(19) United States
(12) Patent Application Publication
(10) Pub. No.: US 2013/0243779 A1
(43) Pub. Date: Sep. 19, 2013

(54) PEPTIDES PROTECTIVE AGAINST E. FAECALIS, METHODS AND USES RELATING THERETO

(71) Applicants: Eszter Nagy, Vienna (AT); Beatrice Tschanun, Vienna (AT); Markus Hanner, Pressbaum (AT); Manfred Berger, Wiener Neustadt (AT); Andreas Meinke, Pressbaum (AT); Alexander Von Gabain, Vienna (AT); Barbara Murray, Houston, TX (US); Kavindra Singh, Houston, TX (US)

(72) Inventors: Eszter Nagy, Vienna (AT); Beatrice Tschanun, Vienna (AT); Markus Hanner, Pressbaum (AT); Manfred Berger, Wiener Neustadt (AT); Andreas Meinke, Pressbaum (AT); Alexander Von Gabain, Vienna (AT); Barbara Murray, Houston, TX (US); Kavindra Singh, Houston, TX (US)

(73) Assignee: Intercell AG, Vienna (AT)

(21) Appl. No.: 13/147,612

(22) PCT Filed: Feb. 4, 2010
(86) PCT No.: PCT/EP2010/051341

§ 371 Date: Nov. 4, 2011

(30) Foreign Application Priority Data
Feb. 5, 2009 (EP) 09152113.8

(51) Int. Cl. C07K 14/335; C07K 16/12

(52) U.S. Cl. CPC C07K 14/335; C07K 16/1267
USPC 424/139.1; 424/190.1; 424/93.2; 435/7.1; 435/71.1; 435/331; 435/320.1; 514/21.2; 514/44 R; 530/350; 530/387.3; 530/387.9; 536/23.7

(57) ABSTRACT

The present invention relates to a protective peptide of Enterococcus faecalis (E. faecalis) or a functional active variant thereof, optionally further consisting of additional amino acid residue(s); a nucleic acid coding for the same; a pharmaceutical composition comprising said peptide or said nucleic acid; an antibody or functional active fragment thereof specifically binding to the antigen; a hybridoma cell line which produces said antibody; a method for producing said antibody; a pharmaceutical composition comprising said antibody; the use of said peptide or said nucleic acid for the manufacture of a medicament for the immunization or treatment of a subject; the use of said antibody or functional fragment thereof for the manufacture of a medicament for the treatment of an infection; a method of diagnosing an E. faecalis infection; and the use of said peptide for the isolation and/or purification and/or identification of an interaction partner of the peptide.

[0001] The present invention relates to a protective peptide of Enterococcus faecalis (E. faecalis) or a functional active variant thereof, optionally further consisting of additional amino acid residue(s); a nucleic acid coding for the same; a pharmaceutical composition comprising said peptide or said nucleic acid; an antibody or functional active fragment thereof specifically binding to the antigen; a hybridoma cell line which produces said antibody; a method for producing said antibody; a pharmaceutical composition comprising said antibody; the use of said peptide or said nucleic acid for the manufacture of a medicament for the immunization or treatment of a subject; the use of said antibody or functional fragment thereof for the manufacture of a medicament for the treatment of an infection; a method of diagnosing an E. faecalis infection; and the use of said peptide for the isolation and/or purification and/or identification of an interaction partner of the peptide.

[0002] Enterococci are gram-positive bacteria that are normal inhabitants of the alimentary tract of humans and animals. They have been recognized as a cause of infective endocarditis for more than a century {Murray, B., 1990} and have gained prominence over the last two decades as being among the most common pathogens found in hospital-acquired infections, and surgical-site infections {Richards, M. et al., 2000}. The increasing importance of enterococci as nosocomial pathogens can be attributed in part to intrinsic and acquired antibiotic resistance {Murray, B., 1990}; {Rice, L., 2001}. Treatment of multi-drug-resistant enterococcal infections poses a significant challenge to clinicians {Cetinkaya, Y. et al., 2000}; {Gold, H., 2001}, and the potential of these organisms to serve as a reservoir for antibiotic resistance genes is of great concern {French, G., 1998}; {Noble, W. et al., 1992}; {Poyart, C. et al., 1997}.

[0003] The classification of enterococci as group D streptococci dates back to the early 1930's. In 1984, enterococci were given formal genus status after several studies demonstrated a more distant relationship with the streptococci.

[0004] Enterococci are generally considered commensals of the gastrointestinal tract of a variety of organisms including man. Although there are more than 14 different species of enterococci, E. faecalis and E. faecium are the species most commonly found in humans. Several intrinsic features of Enterococcus may allow members of this genus to survive for extended periods of time, leading to its persistence and nosocomial spread. The ability of enterococci to adapt and persist in the presence of detergents may allow them to survive inadequate cleaning regimens, contributing to their persistence in the hospital. The intrinsic ruggedness of enterococci also confers an unusual level of tolerance to several classes of antibiotics including aminoglycosides, beta-lactams and quinolones. For example, the resistance of enterococci to aminoglycosides results from the ability of enterococci to block the uptake of the drug at the cell wall. Although the mechanism of high-level resistance was determined to be the result of a bifunctional enzyme {Ferretti, J. et al., 1986}, the molecular basis for the intrinsic resistance of enterococci to low-levels of aminoglycosides remains to be determined.

[0005] Among enterococci, E. faecium is unique because it is commonly used in production of fermented foods, and is also used as a probiotic bacterium. In recent years, E. faecium has been less acceptable as a food fermentation organism because of concern that this bacterium may be an intermediate host for spreading of antibiotic resistance to bacteria involved in human infections. Despite these concerns, E. faecium is still amongst the most common bacteria found in foods fermented by lactic acid bacteria. Many isolates of E. faecium have been shown to produce bacteriocins (antimicrobial peptides) that are able to kill or inhibit growth of pathogens such as Listeriae, Clostridia, bacilli, and staphylococci. Such bacteriocins may contribute to the preservative effect of food fermentations, and is one reason why they have been chosen as starter cultures in the production of fermented food. Recently, enterocins have been implemented successfully in treatment of mastitis in cattle.

[0006] Besides the applications for food production, as probiotics and in treatment of animal disease, and more importantly, enterococci are emerging opportunistic human pathogens. This is due to their intrinsic pathogenic potential, and, even more because of their ability to rapidly acquire antibiotic resistance genes. E. faecium and E. faecalis are the causing agents of a large percentage of hospital-acquired infections, including super infections.

[0007] Enterococci normally colonize the gastrointestinal tract of man. They are found in relative abundance in human feces. A close association is likely to exist between enterococci and its host, or the organism would be eliminated due to normal intestinal motility. Many infection-derived enterococcal isolates were found to be clonal, indicating nosocomial transmission. Moreover, a number of studies have documented patient colonization following hospital admission, and have shown that colonization with multiple resistant strains is a predisposing factor for subsequent infection.

[0008] One of the enigmas of nosocomial enterococcal infection not easily explained is the ready colonization of an ecology already occupied by members of the same species. As noted, antibiotics lacking substantial anti-enterococcal activity (i.e. antibiotics that do not deleteriously affect indigenous enterococci) are important predisposing factors for infection. These infections are frequently caused by multiple resistant enterococcal isolates that have been exogenously acquired and appear to have out competed indigenous enterococci in the absence of direct selection. The fact that exogenous, multiple resistant, nosocomially transmitted enterococci efficiently colonize the gastrointestinal tract suggests that they may not compete directly for the same niche as indigenous strains.

[0009] Infection caused by the genus Enterococcus include a) bacteremia, b) urinary tract infections c) endophthalmitis, d) endocarditis and also wound and intra-abdominal infections. Approximately 75% of the infections are caused by the species E. faecalis, the rest by E. faecium:

### a) Bacteremia

[0010] Nosocomial surveillance data for the period October 1986-April 1997 list enterococci as the third most common cause of nosocomial bacteremia, accounting for 12.8% of all isolates. The translocation of enterococci across an intact intestinal epithelial barrier is thought to lead to many bacteremias with no identifiable source. The risk factors for mortality associated with enterococcal bacteremia include severity of illness, patient age, and use of broad spectrum antibiotics, such as third-generation cephalosporins or metronidazole. These studies suggest that high-level aminoglycoside resistance does not affect clinical outcome, and that the presence of the E. faecalis cytolysin (hemolysin) may enhance the severity of the infection.

### b) Urinary Tract Infections

[0011] Enterococci have been estimated to account for 110,000 urinary tract infections (UTI) annually in the United States. A few studies have been aimed at understanding the interaction of enterococci with uroepithelial tissue. A potential role for the plasmid-encoded aggregation substance in the adhesion of enterococci to renal epithelial cells has been demonstrated. E. faecalis harboring the pheromone responsive plasmid pAD1, or various isogenic derivatives, were better able to bind to the cultured pig renal tubular cell line, LLC-PK, than plasmid free cells. Their findings also showed that a synthetic peptide containing the fibronectin motif, Arg-Gly-Asp-Ser, could inhibit binding. This structural motif mediates the interaction between fibronectin and eukaryotic surface receptors of the integrin family.

### c) Endophthalmitis

[0012] Colonization of host tissue may play a role in the pathogenesis of endophthalmitis. Enterococci are among the most destructive agents that cause this post-operative complication of cataract surgery. Experiments designed to determine whether aggregation substance targeted E. faecalis to alternate anatomical structures within the eye showed that enterococci attach to membranous structures in the vitreous, but that such adherence is not dependent on the presence of aggregation substance.

### d) Endocarditis

[0013] Of the diverse infections caused by enterococci, infective endocarditis (IE) is one of the most therapeutically challenging. Enterococci are the third leading cause of infective endocarditis, accounting for 5-20% of cases of native valve IE, and 6-7% of prosthetic valve endocarditis. The presence of the pheromone-responsive plasmid pAD1 enhances vegetation formation in enterococcal endocarditis. Serum from a patient with E. faecalis endocarditis was used to identify an antigen selectively expressed in serum but not in broth culture {Lowe, A. et al., 1995}. This protein antigen, designated EfaA, has extensive sequence similarity with several streptococcal adhesions and might function as an important adhesin in endocarditis.

[0014] Ampicillin is the therapy of choice for enterococcal infections. For serious enterococcal infection, particularly for endocarditis, aminoglycosides are critical as part of combination therapy with penicillin or ampicillin. Although enterococci are intrinsically resistant to low levels of aminoglycosides, the addition of the cell wall inhibitors to aminoglycoside will result in an enhanced killing by the synergistic action of the two antimicrobials. With the increasing incidence of high level resistance to aminoglycosides and penicillins, vancomycin has become the only choice available for the treatment of enterococcal infections. Then, vancomycin resistance was reported in clinical isolates of enterococci in 1988, followed by an outbreak caused by vancomycin-resistant enterococci (VRE). In U.S. hospitals the percentage of nosocomial enterococci resistant to vancomycin increased from 0.3% in 1989 to 7.9% in 1993. Among patients in intensive care units with nosocomial infections an increase was even more dramatic; from 0.4% in 1989 to 13.6% in 1993, a 34-fold increase in the 4-year period.

[0015] In addition to a higher mortality rate, vancomycin-resistant enterococcal infections cost on average about $25,000 more to treat and doubled the patients' length of stay in the hospital.

[0016] The dramatic increase in vancomycin resistance, especially among E. faecium isolates, indicates that enterococcal infection will pose an increasing challenge in the future. An obvious therapeutic alternative is vaccination with the aim to induce protective immune responses, which prevents or attenuates infections.

[0017] Vaccine development is hindered by the lack of sufficient knowledge about the elements of protective immunity against enterococcal infections. There are reports that neutrophil mediated killing of enterococci was largely a function of complement with antibody playing a less essential but potentially important role, though additional evidence for the importance of anti-enterococcal antibodies in promoting clearance by opsonophagocytic killing was recently reported {Gaglani, M. et al., 1997}.

[0018] The importance of surface proteins in human immunity to Enterococcus already has been appreciated. It is apparent that all clinical isolates express surface proteins with activity relevant to host immune defense. The enterococcal surface protein (Esp) {Shankar, V. et al., 1999}, gelatinase, cytolysin {Haas, W. et al., 2002} and aggregation substance (AS) surface protein {Sussmuth, S. et al., 2000} are well-characterized biochemically and genetically, and have also been shown to be immunogenic {Xu, Y. et al., 1997}. In an animal model of infective endocarditis specific antibodies against the aggregation substance were still not protective {McCormick, J. et al., 2001}.

[0019] Thus, there remains a need for an effective treatment to prevent or ameliorate enterococcal infections. Vaccines capable of showing cross-protection against the majority of Enterococcus strains causing human infections could also be useful to prevent or ameliorate infections caused by all other enterococcal species, namely E. faecalis and E. faecium.

[0020] A vaccine can contain a whole variety of different antigens. Examples of antigens are whole-killed or attenuated organisms, subfractions of these organisms/tissues, proteins, or, in their most simple form, peptides. Antigens can also be recognized by the immune system in form of glycosylated proteins or peptides and may also be or contain polysaccharides or lipids. Short peptides can be used since for example cytotoxic T-cells (CTL) recognize antigens in form of short usually 8-11 amino acids long peptides in conjunction with major histocompatibility complex (MHC). B-cells can recognize linear epitopes as short as 4-5 amino acids, as well as three-dimensional structures (conformational epitopes). In order to obtain sustained, antigen-specific immune responses, adjuvants need to trigger immune cascades that involve all cells of the immune system necessary. Primarily, adjuvants are acting, but are not restricted in their mode of action, on so-called antigen presenting cells (APCs). These cells usually first encounter the antigen(s) followed by presentation of processed or unmodified antigen to immune effector cells. Intermediate cell types may also be involved. Only effector cells with the appropriate specificity are activated in a productive immune response. The adjuvant may also locally retain antigens and co-injected other factors. In addition the adjuvant may act as a chemoattractant for other immune cells or may act locally and/or systemically as a stimulating agent for the immune system.

[0021] Currently vaccines against enterococcal infection are only in the research stages of development. Efforts are focused not only on capsular polysaccharide (CPS) as immunogens {Huebner, J. et al., 2000}, but also on virulence factors and membrane/surface proteins.

[0022] The development of protein conjugated vaccines are no doubt a great new addition to the amarmatorium in the battle against enterococcal infections, but the vaccine can contain only a limited number of enterococcal proteins and given adequate ecological pressure, variation of the pathogenicity island and plasmids by non-vaccine clinical isolates remains a real threat. Moreover polysaccharide antigens used for active immunization do not provide immunological memory in humans. Conjugation of CPS to non-enterococcal related immunogenic protein carriers (e.g. tetanus toxoid, cholera toxin B subunit, etc.) has been shown to be beneficial in inducing higher concentrations of antibodies in vaccinees, but it does not provide pathogen-specific B cell and T cell epitopes which would recruit memory B and T cells during a real infection to support the most effective host response. To be able to supplement the enterococcal vaccines with proteins fulfilling these criteria it is necessary to identify conserved immunogenic enterococcal-specific surface proteins.

[0023] Certain proteins or enzymes displayed on the surface of gram-positive organisms significantly contribute to pathogenesis, are involved in the disease process caused by these pathogens. Often, these proteins are involved in direct interactions with host tissues or in concealing the bacterial surface from the host defense mechanisms {Navarre, W. et al., 1999}. E. faecalis is not an exception in this regard. Several surface proteins are characterized as virulence factors, important for enterococcal pathogenicity reviewed in {Jett, B. et al., 1994}. If antibodies to these proteins could offer better protection to humans then polysaccharides, they could provide the source of a novel, protein-based enterococcal vaccine to be used in conjunction with or in place of the more traditional capsular polysaccharide vaccine. The use of some of the above-described proteins as antigens for a potential vaccine is based on easiness of identification or chance of availability.

[0024] In order to identify vaccine candidates from bacterial pathogens methods for identification, isolation and production of hyperimmune serum reactive antigens from a specific pathogen, especially from Staphylococcus aureus and Staphylococcus epidermidis, have been developed (WO 02/059148). Moreover, methods for identification of reactive antigens as well as reactive antigens from E. faecalis have been provided (WO 04/106367).

[0025] However, some of these antigens are large proteins, which may be disadvantageous in the context of immunization. First, providing of smaller antigens eases production of the protein in recombinant form. It is generally accepted that it is more difficult to produce larger proteins. Smaller proteins may be produced in a more economic manner, thus saving costs, particularly in the health care system. Second, reducing the size of antigenic proteins used for vaccination may lead to safer products. Eliminating extra sequences in antigenic proteins is desirable, since this reduces the probability of inducing antibodies which can cause cross-reactions with human tissues. Third, proteins used for vaccination may contain more than one antigen, the antigens directed either against the same disease or against different diseases, in order to obtain a more effective vaccination or vaccination against several diseases. However, if the single antigens are too large a combination into one fusion protein is not feasible.

[0026] On the other hand, there is a great potential for passive antibody-based therapy. There have been already attempts to use human intravenous immunoglobulin (IVIG) preparations for prevention. Recent advances in the technology of monoclonal antibody production provide the means to generate human antibody reagents and reintroduce antibody therapies, while avoiding the toxicities associated with serum therapy. Immunoglobulins are an extremely versatile class of antimicrobial proteins that can be used to prevent and treat emerging infectious diseases. Antibody therapy has been effective against a variety of diverse microorganisms reviewed in {Burnie, J. et al., 1998}. Anti-enterococcal mAB could be given therapeutically to immunosuppressed patient, due to organ transplantation, cancer, HIV infection and other causes.

[0027] Accordingly, one problem underlying the present invention was to provide an appropriate antigen of E. faecalis for the development of medicaments such as vaccines against an Enterococcus infection. More particularly, the problem was to provide a protective peptide or combinations thereof from E. faecalis that can be used for the manufacture of said medicaments.

[0028] Consequently, the present invention provides a protective peptide of a hyperimmune serum reactive antigen consisting of the amino acid sequence of the SEQ ID NO: 21, 22, 23, 24, 25, 26, 27, 28, 29, 30, 31, 32, 33, 34, 35, 36, 37, 38, 39 or 40, or a functional active variant of the protective peptide, or a fragment (portion) thereof. These peptides are also referred to as antigenic peptides.

[0029] The protective peptides consisting of the amino acid sequences of SEQ ID NOs: 21 to 40 are derived from E. faecalis strain V583 described earlier (GenBank accession numbers for chromosome and the plasmids are: AE016830 (chromosome), AE016833 (pTEF1), AE016831 (pTEF2), AE016832 (pTEF3); {Paulsen, I. et al., 2003}).

[0030] The amino acid and DNA sequences of the full length antigens from which the protective peptides consisting of the amino acid sequences of SEQ ID NOs: 21 to 40 are derived are disclosed in WO 04/106367.

[0031] The amino acid sequences of SEQ ID NOs: 21 to 40 and corresponding DNA sequences of SEQ ID NOs: 1 to 20 are disclosed in the attached Sequence Listing and Table 2 (see Example 1). The peptides of SEQ ID NOs: 21 to 40 have been shown to induce protective immune response against E. faecalis in an animal model of infective endocarditis (see Example 1 and Figures). Functional active variants may be obtained by changing the sequence of the protective peptide as defined below and are characterized by having a biological activity similar to that displayed by the protective peptide of the sequence of SEQ ID NOs: 21 to 40 from which the variant is derived, including the ability to induce protective immune responses and/or to show protection against E. faecalis e.g. in an animal model of infective endocarditis, wherein any variant may be tested as described in the Examples.

[0032] In another preferred embodiment of the invention the peptide of the invention or a functional active variant, can further consist of
[0033] a) 1 to 450 additional amino acid residue(s), preferably 1 to 400, 1 to 350, 1 to 300, 1 to 250, 1 to 200, 1 to 150, more preferably 1 to 100, even more preferably at most 1 to 50, most preferably 1, 2, 3, 4, 5, 10, 20, 30 or 40 additional amino acids residue(s) if the antigen is SEQ ID NO: 21; or
[0034] b) 1 to 400 additional amino acid residue(s), preferably 1 to 350, 1 to 300, 1 to 250, 1 to 200, 1 to 150, more preferably 1 to 100, even more preferably at most 1 to 50, most preferably 1, 2, 3, 4, 5, 10, 20, 30 or 40 additional amino acids residue(s) if the antigen is SEQ ID NO: 22; or
[0035] c) 1 to 300 additional amino acid residue(s), preferably 1 to 250, 1 to 200, 1 to 150, more preferably 1 to 100, even more preferably at most 1 to 50, most preferably 1, 2, 3, 4, 5, 10, 20, 30 or 40 additional amino acids residue(s) if the antigen is SEQ ID NO: 24; or
[0036] d) 1 to 125 additional amino acid residue(s), preferably 1 to 100, 1 to 80, 1 to 60, more preferably 1 to 40, even more preferably at most 1 to 30, most preferably 1, 2, 3, 4, 5, 10, 15, 20, or 25 additional amino acids residue(s) if the antigen is SEQ ID NO: 25.

[0037] The protective peptide of E. faecalis can be any of the peptides as defined above, namely as defined in any of the SEQ ID NO: 21, 22, 23, 24, 25, 26, 27, 28, 29, 30, 31, 32, 33, 34, 35, 36, 37, 38, 39 or 40, or a functional active variant thereof, wherein the functional active variant is as defined below.

[0038] The functional active variant of the protective peptide may have added at least one additional amino acid residue heterologous or homologous to the peptide of any of the SEQ ID NOs: 21 to 40. Homologous refers to any amino acid residue which is identical to the amino acid residue of the protein from E. faecalis from which the peptide is derived, wherein the peptide of any of the SEQ ID NO: 21 to 40 is derived from the protein as listed in the table below (Table 1). Alternatively or additionally, the protective peptide may consist of the antigen, optionally the additional sequence as defined above and at least one amino acid residue heterologous to the antigen, preferably a marker protein.

TABLE 1
Peptides of the present invention are related to proteins from
WO 04/106367.

| | Derived from protein (as disclosed in WO |
|---|---|
| Protective peptide | 04/106367) |
| SEQ ID NO: 21 | EF0032 |
| SEQ ID NO: 22 | EF0270 |
| SEQ ID NO: 23 | EF0428 |
| SEQ ID NO: 24 | EF0779 |
| SEQ ID NO: 25 | EF0792 |
| SEQ ID NO: 26 | EF1026 |
| SEQ ID NO: 27 | EF1032 |
| SEQ ID NO: 28 | EF1060 |
| SEQ ID NO: 29 | EF1093 |
| SEQ ID NO: 30 | EF1277 |
| SEQ ID NO: 31 | EF1355 |
| SEQ ID NO: 32 | EF1692 |
| SEQ ID NO: 33, 41 | EF2703 |
| SEQ ID NO: 34 | EF3051 |
| SEQ ID NO: 35 | EF3177 |
| SEQ ID NO: 36 | EF3183 |
| SEQ ID NO: 37, 42 | EF3207 |
| SEQ ID NO: 38, 43 | EF3256 |
| SEQ ID NO: 39 | EFA0042 |
| SEQ ID NO: 40, 44 | EFC0034 |

[0039] The functional active variant of the protective peptide may be obtained by sequence alterations in the protective peptide, wherein the peptide with the sequence alterations retains a function of the unaltered protective peptide, e.g. having a biological activity similar to that displayed by the unaltered protective peptide. Such sequence alterations can include, but are not limited to, (conservative) amino acid substitutions, deletions, mutations and insertions.

[0040] The additional sequence or amino acid residue(s) as defined above consists of (an) amino acid residue(s), which may be any amino acid, which may be either an L- and/or a D-amino acid, naturally occurring and otherwise. Preferably the amino acid is any naturally occurring amino acid such as alanine, cysteine, aspartic acid, glutamic acid, phenylalanine, glycine, histidine, isoleucine, lysine, leucine, methionine, asparagine, proline, glutamine, arginine, serine, threonine, valine, tryptophan or tyrosine.

[0041] However, the amino acid may also be a modified or unusual amino acid. Examples of those are 2-aminoadipic acid, 3-aminoadipic acid, beta-alanine, 2-aminobutyric acid, 4-aminobutyric acid, 6-aminocaproic acid, 2-aminoheptanoic acid, 2-aminoisobutyric acid, 3-aminoisobutyric acid, 2-aminopimelic acid, 2,4-diaminobutyric acid, desmosine, 2,2′-diaminopimelic acid, 2,3-diaminopropionic acid, N-ethylglycine, N-ethylasparagine, hydroxylysine, allo-hydroxylysine, 3-hydroxyproloine, 4-hydroxyproloine, isodesmosine, allo-isoleucine, N-methylglycine, N-methylisoleucine, 6-N-Methyllysine, N-methylvaline, norvaline, norleucine or ornithine. Additionally, the amino acid may be subject to modifications such as posttranslational modifications. Examples of modifications include acetylation, amidation, blocking, formylation, γ-carboxyglutamic acid hydroxylation, glycosilation, methylation, phosphorylation and sulfatation. If more than one additional or heterologous amino acid residue is present in the peptide, the amino acid residues may be the same or different from one another.

[0042] In one embodiment the peptide of the invention further encompasses at least one amino acid residue heterologous to the antigen. The feature “heterologous amino acid” or “amino acid heterologous to the antigen or protein” refers to any amino acid which is different from that amino acid located adjacent to the antigen or protein in any naturally occurring protein of E. faecalis, particularly from that of E. faecalis strain V583 (serogroup CPS-C). Therefore, the protein of the invention encompassing at least one heterologous amino acid refers to a protein which is different from any naturally occurring protein of E. faecalis or fragment thereof, particularly which is different from that of E. faecalis strain V583 (serogroup CPS-C). The proteins from which the antigens of the invention are derived as well as a reference for their sequences are disclosed in WO 04/106367 and in the table above (Table 1).

[0043] In one preferred embodiment of the invention the peptide of the invention comprising additional amino acid residue(s) as defined above is characterized in that it comprises at least 2, preferably at least 3, more preferably at least 4 antigens as defined above.

[0044] The antigenic peptide may be flanked by the amino acid residue(s) C-terminally, N-terminally or C- and N-terminally.

[0045] In one embodiment of the invention, the functional active variant of the peptide of the invention is essentially identical to any of the antigens of the SEQ ID NOs: 21 to 40, but differs from the antigens of any of the of the SEQ ID NOs: 21 to 40, in that it is derived from a homologous sequence of a different strain and/or serotype of E. faecalis.

[0046] Accordingly, the present invention also relates to antigens of different E. faecalis isolates. Such homologues may easily be isolated based on the nucleic acid and amino acid sequences disclosed herein. The presence of any antigen can be determined for every serotype. In addition it is possible to determine the variability of a particular antigen in the various serotypes as described for the sic gene {Hoe, N. et al., 2001}. The contribution of the various serotypes to the different enterococcal infections varies in the different age groups and geographical regions. It is an important aspect that the most valuable protective antigens are expected to be conserved among various clinical isolates. A homologous antigen of a different serotype may be identified by e.g. sequence alignment. The homologous antigen sequence may vary from the antigen of any of the sequences of SEQ ID NOs: 21 to 40 by one or more amino acid substitutions, deletions and/or additions.

[0047] In another embodiment of the present invention the functional active variant is a fragment of any of the sequences of SEQ ID NOs: 21 to 40. The fragment is characterized by being derived from the antigen as defined above by one or more amino acid deletions. The deletion(s) may be C-terminally, N-terminally and/or internally. Preferably the fragment is obtained by at most 10, 20, 30, 40, 50, 60, 80, 100, 150 or 200, more preferably by at most 10, 20, 30, 40 or 50, even more preferably at most 5, 10 or 15, still more preferably at most 5 or 10, most preferably 1, 2, 3, 4 or 5 deletion(s). The functional active fragment of the invention is characterized by having a biological activity similar to that displayed by the complete antigen, including the ability to induce immune response and/or to show protection against E. faecalis e.g. in an infective endocarditis model. The fragment of an antigen is functional active in the context of the present invention, if the activity of the fragment amounts to at least 10%, preferably at least 25%, more preferably at least 50%, even more preferably at least 70%, still more preferably at least 80%, especially at least 90%, particularly at least 95%, most preferably at least 99% of the activity of the antigen without sequence alteration. These fragments may be designed or obtained in any desired length, including as small as about 50 to 80 amino acids in length.

[0048] In a further embodiment a fragment of the peptide of the invention are characterized by structural or functional attributes, such as alpha-helix, beta-sheet, turn and coil-forming regions, hydrophilic regions, hydrophobic regions, alpha-amphipathic regions, beta-amphipathic regions, flexible regions, surface-forming regions, substrate binding regions, and high antigenic index regions of the peptide according to the present invention, and combinations of such fragments. Preferred regions are those that mediate antigenicity and antibody binding activities of the peptides according to the present invention. Most highly preferred in this regard are fragments that have a chemical, biological or other activity of the peptides and variants thereof of the present invention, including those with a similar activity or an improved activity, whereby such improved activities are immunogenicity and stability, or with a decreased undesirable activity, whereby such decreased undesirable activity is enzymatic and toxic function and generation of human cross-reactive antibodies. Particularly preferred fragments of the peptides according to the present invention are those that comprise or contain antigenic or immunogenic determinants in an animal, especially in a human. Such fragments are also referred to as antigenic fragment. An antigenic fragment is antigenic by itself or may be made antigenic when provided as a hapten.

[0049] Accordingly, in one preferred embodiment of the invention the functional active fragments consists of at least 60%, preferably at least 70%, more preferably at least 80%, still more preferably at least 90%, even more preferably at least 95%, most preferably 99% of the antigenic peptide of any of the SEQ ID NOs: 21 to 40.

[0050] Another preferred embodiment of the invention relates to a peptide as defined above in the previous embodiments, wherein the peptide is a functional active variant of an antigen of any of the SEQ ID NOs: 21 to 40 and wherein the variant has at least 50% sequence identity to the antigen of any of the SEQ ID NOs: 21 to 40. In a more preferred embodiment the functional active variant has a sequence identity of at least 60%, preferably at least 70%, more preferably at least 80%, still more preferably at least 90%, even more preferably at least 95%, most preferably 99% to the antigen of any of the SEQ ID NOs: 21 to 40.

[0051] The percentage of sequence identity can be determined e.g. by sequence alignment. Methods of alignment of sequences for comparison are well known in the art. Various programs and alignment algorithms have been described e.g. in Smith and Waterman, Adv. Appl. Math. 2: 482, 1981 or Pearson and Lipman, Proc. Natl. Acad. Sci. U.S.A. 85: 2444-2448, 1988.

[0052] The NCBI Basic Local Alignment Search Tool (BLAST) (Altschul et al., J. Mol. Biol. 215: 403-410, 1990) is available from several sources, including the National Center for Biotechnology Information (NCBI, Bethesda, Md.) and on the Internet, for use in connection with the sequence analysis programs blastp, blastn, blastx, tblastn and tblastx. Variants of an antigen of any of the sequences of SEQ ID NOs: 21 to 40 are typically characterized using the NCBI Blast 2.0, gapped blastp set to default parameters. For comparisons of amino acid sequences of at least 35 amino acids, the Blast 2 sequences function is employed using the default BLOSUM62 matrix set to default parameters, (gap existence cost of 11, and a per residue gap cost of 1). When aligning short peptides (fewer than around 35 amino acids), the alignment is performed using the Blast 2 sequences function, employing the PAM30 matrix set to default parameters (open gap 9, extension gap 1 penalties). Methods for determining sequence identity over such short windows such as 15 amino acids or less are described at the website that is maintained by the National Center for Biotechnology Information in Bethesda, Md. (http://www.ncbi.nlm.nih.gov/BLAST/).

[0053] The functional active variant of an antigen is obtained by sequence alterations in the antigen, wherein the antigen with the sequence alterations retains a function of the unaltered antigen. Such sequence alterations can include, but are not limited to, conservative substitutions, deletions, mutations and insertions. In the context of the present invention a variant specifically has a biological activity similar to that displayed by the antigen without alteration, including the ability to induce an immune response and/or to show protection against E. faecalis e.g. in an infective endocarditis model if the activity of the variant amounts to at least 10%, preferably at least 25%, more preferably at least 50%, even more preferably at least 70%, still more preferably at least 80%, especially at least 90%, particularly at least 95%, most preferably at least 99% of the activity of the antigen without sequence alterations.

[0054] The term “functional active variant” includes naturally-occurring allelic variants, as well as mutants or any other non-naturally occurring variants. As is known in the art, an allelic variant is an alternate form of a (poly)peptide that is characterized as having a substitution, deletion, or addition of one or more amino acids that does essentially not alter the biological function of the polypeptide. By “biological function” is meant a function of the polypeptide in the cells in which it naturally occurs, even if the function is not necessary for the growth or survival of the cells. For example, the biological function of a porin is to allow the entry into cells of compounds present in the extracellular medium. The biological function is distinct from the antigenic function. A polypeptide can have more than one biological function.

[0055] Within any species of the living world, allelic variation is the rule. For example, any bacterial species, e.g. E. faecalis, is usually represented by a variety of strains (characterized by clonal reproduction) that differ from each other by minor allelic variations. Indeed, a polypeptide that fulfils the same biological function in different strains can have an amino acid sequence that is not identical in each of the strains. Such an allelic variation is equally reflected at the polynucleotide level.

[0056] In a preferred embodiment, the functional active variant or fragment derived from the antigen by amino acid exchanges, deletions or insertions may also conserve, or more preferably improve, the activity (as defined above). Furthermore, these peptides may also cover epitopes, which trigger the same or preferably an improved T cell response. These epitope are referred to as “heteroclitic”. They have a similar or preferably greater affinity to MHC/HLA molecules, and the ability to stimulate the T cell receptors (TCR) directed to the original epitope in a similar or preferably stronger manner. Heteroclitic epitopes can be obtained by rational design i.e. taking into account the contribution of individual residues to binding to MHC/HLA as for instance described by (Rammensee, H. et al., 1999, Immunogenetics. 50: 213-219), combined with a systematic exchange of residues potentially interacting with the TCR and testing the resulting sequences with T cells directed against the original epitope. Such a design is possible for a skilled man in the art without much experimentation.

[0057] In a still more preferred embodiment of the invention the functional active variant of an antigen of any of the SEQ ID NOs: 21 to 40 having at least 50% sequence identity to the antigen of any of the SEQ ID NOs: 21 to 40, especially at least 60%, preferably at least 70%, more preferably at least 80%, still more preferably at least 90%, even more preferably at least 95%, most preferably 99% to the antigen of any of the SEQ ID NOs: 21 to 40 is derived from the antigen of any of the sequences of SEQ ID NOs: 21 to 40 by conservative substitutions. Conservative substitutions are those that take place within a family of amino acids that are related in their side chains and chemical properties. Examples of such families are amino acids with basic side chains, with acidic side chains, with non-polar aliphatic side chains, with non-polar aromatic side chains, with uncharged polar side chains, with small side chains, with large side chains etc. In one embodiment, one conservative substitution is included in the peptide. In another embodiment, two conservative substitutions or less are included in the peptide. In a further embodiment, three conservative substitutions or less are included in the peptide.

[0058] Examples of conservative amino acid substitutions include, but are not limited to, those listed below:

| Original Residue | Conservative Substitutions |
|---|---|
| Ala | Ser |
| Arg | Lys |
| Asn | Gln; His |
| Asp | Glu |
| Cys | Ser |
| Gln | Asn |
| Glu | Asp |
| His | Asn; Gln |
| Ile | Leu; Val |
| Leu | Ile; Val |
| Lys | Arg; Gln; Asn |
| Met | Leu; Ile |
| Phe | Met; Leu; Tyr |
| Ser | Thr |
| Thr | Ser |
| Trp | Tyr |
| Tyr | Trp; Phe |
| Val | Ile; Leu |

[0059] In another embodiment of the invention the peptide as defined above may be modified by a variety of chemical techniques to produce derivatives having essentially the same activity (as defined above for fragments and variants) as the modified peptides, and optionally having other desirable properties. For example, carboxylic acid groups of the protein, whether C-terminal or side chain, may be provided in the form of a salt of a pharmaceutically-acceptable cation or esterified to form an ester, or converted to an amide. Amino groups of the peptide, whether amino-terminal or side chain, may be in the form of a pharmaceutically-acceptable acid addition salt, such as the HCl, HBr, acetic, benzoic, toluene sulfonic, maleic, tartaric and other organic salts, or may be converted to an amide. Hydroxyl groups of the peptide side chains may be converted to alkoxy or to an ester using well recognized techniques. Phenyl and phenolic rings of the peptide side chains may be substituted with one or more halogen atoms, such as fluorine, chlorine, bromine or iodine, or with alkyl, alkoxy, carboxylic acids and esters thereof, or amides of such carboxylic acids. Thiols can be protected with any one of a number of well recognized protecting groups, such as acetamide groups.

[0060] Peptides of this invention may be in combination with outer surface proteins or other proteins or antigens of other proteins. In such combination, the antigen may be in the form of a fusion protein. The antigen of the invention may be optionally fused to a selected peptide or protein derived from other microorganisms. For example, an antigen or polypeptide of this invention may be fused at its N-terminus or C-terminus to a polypeptide from another pathogen or to more than one polypeptide in sequence. Peptides which may be useful for this purpose include polypeptides identified by the prior art.

[0061] In a preferred embodiment of the invention the peptide of the invention is fused to an epitope tag which provides an epitope to which an anti-tag substance can selectively bind. The epitope tag is generally placed at the amino- or carboxyl-terminus of the peptide but may be incorporated as an internal insertion or substitution as the biological activity permits. The presence of such epitope-tagged forms of a peptide can be detected using a substance such as an antibody against the tagged peptide. Also, provision of the epitope tag enables the peptide to be readily purified by affinity purification using an anti-tag antibody or another type of affinity matrix that binds to the epitope tag. Various tag polypeptides and their respective antibodies are well known in the art. Examples include poly-histidine (poly-his), poly-histidine-glycine (poly-his-gly) tags, the HA tag polypeptide, the c-myc tag, the Strep tag and the FLAG tag.

[0062] Fusions also may include the peptides or antigens of this invention fused or coupled to moieties other than amino acids, including lipids and carbohydrates. Further, antigens of this invention may be employed in combination with other vaccinal agents described by the prior art, as well as with other species of vaccinal agents derived from other microorganisms. Such proteins are useful in the prevention, treatment and diagnosis of diseases caused by a wide spectrum of Streptococcus isolates.

[0063] These fusion proteins are constructed for use in the methods and compositions of this invention. These fusion proteins or multimeric proteins may be produced recombinantly, or may be synthesized chemically.

[0064] The peptides of the invention may be prepared by any of a number of conventional techniques. Desired peptides may be chemically synthesized. An alternative approach involves generating the fragments of known peptides by enzymatic digestion, e.g., by treating the protein with an enzyme known to cleave proteins at sites defined by particular amino acid residues, or by digesting the DNA with suitable restriction enzymes, expressing the digested DNA and isolating the desired fragment. Yet another suitable technique involves isolating and amplifying a DNA fragment encoding a desired peptide fragment, by polymerase chain reaction (PCR). Oligonucleotides that define the desired termini of the DNA fragment are employed as the 5′ and 3′ primers in the PCR. Techniques for making mutations, such as deletions, insertions and substitutions, at predetermined sites in DNA, and therefore in proteins, having a known sequence are well known. One of skill in the art using conventional techniques, such as PCR, may readily use the antigens and peptides provided herein to identify and isolate other similar proteins. Such methods are routine and not considered to require undue experimentation, given the information provided herein. For example, variations can be made using oligonucleotide-mediated site-directed mutagenesis (Carter et al., Nucl. Acids Res., 13: 4431 (1985); Zoller et al., Nucl. Acids Res. 10:6487 (1987)), cassette mutagenesis (Wells et al., Gene, 34:315 (1985)), restriction selection mutagenesis (Wells et al., Philos. Trans. R. Soc. London SerA, 317:415 (1986)), PCR mutagenesis, or other known techniques can be performed on the cloned DNA to produce the peptide of the invention.

[0065] Another subject of the present invention relates to a nucleic acid encoding a peptide of the invention, i.e. any peptide as defined above, or a nucleic acid complementary thereto. Nucleic acid molecules of the present invention may be in the form of RNA, such as mRNA or cRNA, or in the form of DNA, including, for instance, cDNA and genomic DNA e.g. obtained by cloning or produced by chemical synthetic techniques or by a combination thereof. The DNA may be double-stranded or single-stranded. Single-stranded DNA may be the coding strand, also known as the sense strand, or it may be the non-coding strand, also referred to as the anti-sense strand. Nucleic acid molecule as used herein also refers to, among other, single- and double-stranded DNA, DNA that is a mixture of single- and double-stranded RNA, and RNA that is a mixture of single- and double-stranded regions, hybrid molecules comprising DNA and RNA that may be single-stranded or, more typically, double-stranded, or a mixture of single- and double-stranded regions.

[0066] The nucleic acid may be a fragment of a nucleic acid occurring naturally in E. faecalis. Preferably the nucleic acid has a sequence as defined in any of the sequences of SEQ ID NOs: 1 to 20 or of any of the homologous variants identified in the attached listing of nucleic acid sequences. The nucleic acid also includes sequences that are a result of the degeneration of the genetic code. There are 20 natural amino acids, most of which are specified by more than one codon. Therefore, all nucleotide sequences are included in the invention which result in the peptide as defined above.

[0067] Additionally, the nucleic acid may contain one or more modified bases. Such nucleic acids may also contain modifications e.g. in the ribose-phosphate backbone to increase stability and half life of such molecules in physiological environments. Thus, DNAs or RNAs with backbones modified for stability or for other reasons are “nucleic acid molecule” as that feature is intended herein. Moreover, DNAs or RNAs comprising unusual bases, such as inosine, or modified bases, such as tritylated bases, to name just two examples, are nucleic acid molecule within the context of the present invention. It will be appreciated that a great variety of modifications have been made to DNA and RNA that serve many useful purposes known to those of skill in the art. The term nucleic acid molecule as it is employed herein embraces such chemically, enzymatically or metabolically modified forms of nucleic acid molecule, as well as the chemical forms of DNA and RNA characteristic of viruses and cells, including simple and complex cells, inter alia. For example, nucleotide substitutions can be made which do not affect the polypeptide encoded by the nucleic acid, and thus any nucleic acid molecule which encodes an antigen or fragment or functional active variant thereof as defined above is encompassed by the present invention.

[0068] Furthermore, any of the nucleic acid molecules encoding an antigen of the invention or fragment or functional active variant thereof can be functionally linked, using standard techniques such as standard cloning techniques, to any desired regulatory sequences, whether an E. faecalis regulatory sequence or a heterologous regulatory sequence, heterologous leader sequence, heterologous marker sequence or a heterologous coding sequence to create a fusion protein.

[0069] The nucleic acid of the invention may be originally formed in vitro or in a cell in culture, in general, by the manipulation of nucleic acids by endonucleases and/or exonucleases and/or polymerases and/or ligases and/or recombinases or other methods known to the skilled practitioner to produce the nucleic acids.

[0070] In one embodiment of the invention the nucleic acid is located in a vector. A vector may additionally include nucleic acid sequences that permit it to replicate in the host cell, such as an origin of replication, one or more therapeutic genes and/or selectable marker genes and other genetic elements known in the art such as regulatory elements directing transcription, translation and/or secretion of the encoded protein. The vector may be used to transduce, transform or infect a cell, thereby causing the cell to express nucleic acids and/or proteins other than those native to the cell. The vector optionally includes materials to aid in achieving entry of the nucleic acid into the cell, such as a viral particle, liposome, protein coating or the like. Numerous types of appropriate expression vectors are known in the art for protein expression, by standard molecular biology techniques. Such vectors are selected from among conventional vector types including insects, e.g., baculovirus expression, or yeast, fungal, bacterial or viral expression systems. Other appropriate expression vectors, of which numerous types are known in the art, can also be used for this purpose. Methods for obtaining such expression vectors are well-known (see, e.g. Sambrook et al., Molecular Cloning. A Laboratory Manual, 2^{nd} edition, Cold Spring Harbor Laboratory, New York (1989)). In one embodiment, the vector is a viral vector. Viral vectors include, but are not limited to, retroviral and adenoviral vectors.

[0071] Suitable host cells or cell lines for transfection by this method include bacterial cells. For example, the various strains of E. coli are well-known as host cells in the field of biotechnology. Various strains of B. subtilis, Pseudomonas, Streptomyces, and other bacilli and the like may also be employed in this method. Many strains of yeast cells known to those skilled in the art are also available as host cells for expression of the peptides of the present invention. Other fungal cells such as Aspergillus cells or insect cells such as Spodoptera frugipedera (Sf9) or Drosophila S2 cells may also be employed as expression systems. Alternatively, mammalian cells, such as human 293 cells, Chinese hamster ovary cells (CHO), the monkey COS-1 or murine 3T3 cell lines, HeLa, C127, BHK, 293, Bowes melanoma cells or plant cells may be used. Still other suitable host cells, as well as methods for transfection, culture, amplification, screening, production, and purification are known in the art.

[0072] A peptide of the invention may be produced by expressing a nucleic acid of the invention in a suitable host cell. The host cells can be transfected, e.g. by conventional means such as electroporation with at least one expression vector containing a nucleic acid of the invention under the control of a transcriptional regulatory sequence. The transfected or transformed host cell is then cultured under conditions that allow expression of the protein. The expressed protein is recovered, isolated, and optionally purified from the cell (or from the culture medium, if expressed extracellularly) by appropriate means known to one of skill in the art. For example, the proteins are isolated in soluble form following cell lysis, or extracted using known techniques, e.g. in guanidine chloride. If desired, the peptides or fragments of the invention are produced as a fusion protein. Such fusion proteins are those described above. Alternatively, for example, it may be desirable to produce fusion proteins to enhance expression of the protein in a selected host cell or to improve purification. The molecules comprising the peptides and antigens of this invention may be further purified using any of a variety of conventional methods including, but not limited to: liquid chromatography such as normal or reversed phase, using HPLC, FPLC and the like; affinity chromatography (such as with inorganic ligands or monoclonal antibodies); size exclusion chromatography; immobilized metal chelate chromatography; gel electrophoresis; and the like. One of skill in the art may select the most appropriate isolation and purification techniques without departing from the scope of this invention. Such purification provides the antigen in a form substantially free from other proteinaceous and non-proteinaceous materials of the microorganism.

[0073] As an alternative, a peptide of the preset invention may be produced in cell-free translation systems using RNAs derived from the DNA construct of the present invention. Otherwise, the peptides of the invention can be synthetically produced by conventional peptide synthesizers.

[0074] Another subject of the invention is a pharmaceutical composition, preferably a vaccine, comprising at least one protective peptide according to the invention and optionally a pharmaceutically acceptable carrier or excipient.

[0075] A peptide of the invention may be used for methods for immunizing or treating humans and/or animals with the disease caused by infection with E. faecalis. Therefore, the peptide may be used within a pharmaceutical composition. The pharmaceutical composition of the present invention may further encompass pharmaceutically acceptable carriers and/or excipients. The pharmaceutically acceptable carriers and/or excipients useful in this invention are conventional and may include buffers, stabilizers, diluents, preservatives, and solubilizers. Remington's Pharmaceutical Sciences, by E. W. Martin, Mack Publishing Co., Easton, Pa., 15th Edition (1975), describes compositions and formulations suitable for pharmaceutical delivery of the (poly)peptides herein disclosed. In general, the nature of the carrier or excipients will depend on the particular mode of administration being employed. For instance, parenteral formulations usually comprise injectable fluids that include pharmaceutically and physiologically acceptable fluids such as water, physiological saline, balanced salt solutions, aqueous dextrose, glycerol or the like as a vehicle. For solid compositions (e.g. powder, pill, tablet, or capsule forms), conventional non-toxic solid carriers can include, for example, pharmaceutical grades of mannitol, lactose, starch, or magnesium stearate. In addition to biologically neutral carriers, pharmaceutical compositions to be administered can contain minor amounts of non-toxic auxiliary substances, such as wetting or emulsifying agents, preservatives, and pH buffering agents and the like, for example sodium acetate or sorbitan monolaurate.

[0076] In a preferred embodiment the pharmaceutical composition further comprises an immunostimulatory substance such as an adjuvant. The adjuvant can be selected based on the method of administration and may include mineral oil-based adjuvants such as Freund's complete and incomplete adjuvant, Montanide incomplete Seppic adjuvant such as ISA, oil in water emulsion adjuvants such as the Ribi adjuvant system, syntax adjuvant formulation containing muramyl dipeptide, or aluminum salt adjuvants. Preferably, the adjuvant is a mineral oil-based adjuvant.

[0077] In a more preferred embodiment the immunostimulatory substance is selected from the group comprising polycationic polymers, especially polycationic peptides, immunostimulatory oligodeoxynucleotides (ODNs), especially Oligo(dIdC)₁₃ peptides containing at least two LysLeuLys motifs, especially KLKLLLLLKLK, neuroactive compounds, especially human growth hormone, alum, Freund's complete or incomplete adjuvants, or combinations thereof.

[0078] In a still more preferred embodiment the immunostimulatory substance is a combination of either a polycationic polymer and immunostimulatory oligodeoxynucleotides or of a peptide containing at least two LysLeuLys motifs and immunostimulatory oligodeoxynucleotides, preferably a combination of KLKLLLLLKLK and Oligo(dIdC)₁₃.

[0079] The term “Oligo(dIdC)₁₃” as used in the present invention means a phosphodiester backboned single-stranded DNA molecule containing 13 deoxy (inosine-cytosine) motifs, also de fined by the term [oligo-d(IC)₁₃]. The exact sequence is 5′-dIdCdIdCdIdCdIdCdIdCdIdCdIdCdIdCdIdCdIdCdIdCdIdCdIdC-3′. Oligo(dIdC)₁₃ can also be defined by the terms (oligo-dIC₂₆); oligo-dIC₂₆₋ₘₑᵣ; oligo-deoxy IC, 26-mer; or oligo-dIC, 26-mer, as specified for example in WO 01/93903 and WO 01/93905.

[0080] In an even more preferred embodiment of the pharmaceutical composition of the present invention the polycationic polymer is a polycationic peptide, especially polyarginine.

[0081] In an even more preferred embodiment of the invention the immunostimulatory substance is at least one immunostimulatory nucleic acid. Immunostimulatory nucleic acids are e.g. neutral or artificial CpG containing nucleic acids, short stretches of nucleic acids derived from non-vertebrates or in form of short oligonucleotides (ODNs) containing non-methylated cytosine-guanine dinucleotides (CpG) in a defined base context (e.g. as described in WO 96/02555). Alternatively, also nucleic acids based on inosine and cytidine as e.g. described in WO 01/93903, or deoxynucleic acids containing deoxy-inosine and/or deoxyuridine residues (described in WO 01/93905 and WO 02/095027) may preferably be used as immunostimulatory nucleic acids in the present invention. Preferably, mixtures of different immunostimulatory nucleic acids are used in the present invention. Additionally, the aforementioned polycationic compounds may be combined with any of the immunostimulatory nucleic acids as aforementioned. Preferably, such combinations are according to the ones described in WO 01/93905, WO 02/32451, WO 01/54720, WO 01/93903, WO 02/13857, WO 02/095027 and WO 03/047602.

[0082] In addition or alternatively, the pharmaceutical composition may comprise a neuroactive compound. Preferably, the neuroactive compound is human growth factor, e.g. described in WO 01/24822. Also preferably, the neuroactive compound is combined with any of the polycationic compounds and/or immunostimulatory nucleic acids as defined above.

[0083] The pharmaceutical composition encompasses at least one peptide of the invention; however, it may also contain a cocktail (i.e., a simple mixture) comprising different peptides (including fragments and other variants) of the invention, optionally mixed with different antigenic proteins or peptides of other pathogens. Such mixtures of these peptides, polypeptides, proteins or fragments or variants thereof are useful e.g. in the generation of desired antibodies to a wide spectrum of enterococci isolates. The peptide(s) of the present invention may also be used in the form of a pharmaceutically acceptable salt. Suitable acids and bases which are capable of forming salts with the peptides of the present invention are well known to those of skill in the art, and include inorganic and organic acids and bases.

[0084] Still another subject of the invention is a pharmaceutical composition containing a nucleic acid selected from the group consisting of:

(i) a nucleic acid of the invention and/or a nucleic acid complementary thereto, and
(ii) optionally a pharmaceutically acceptable carrier or excipient.

[0085] In another embodiment, the nucleic acid sequences of this invention, alone or in combination with nucleic acid sequences encoding other antigens or antibodies from other pathogenic microorganisms, may further be used as components of a pharmaceutical composition. The composition may be used for immunizing or treating humans and/or animals with the disease caused by infection with E. faecalis. The pharmaceutically acceptable carrier or excipient may be as defined above.

[0086] For use in the preparation of the therapeutic or vaccine compositions, nucleic acid delivery compositions and methods are useful, which are known to those of skill in the art. The nucleic acid of the invention may be employed in the methods of this invention or in the compositions described herein as DNA sequences, either administered as naked DNA, or associated with a pharmaceutically acceptable carrier and provide for in vivo expression of the antigen, peptide or polypeptide. So-called “naked DNA” may be used to express the antigen, peptide or polypeptide of the invention in vivo in a patient. (See, e.g., J. Cohen, Science, 259:1691-1692, which describes similar uses of “naked DNA”). For example, “naked DNA” associated with regulatory sequences may be administered therapeutically or as part of the vaccine composition e.g., by injection.

[0087] Alternatively, a nucleic acid encoding the antigens or peptides of the invention or a nucleic acid complementary thereto may be used within a pharmaceutical composition, e.g. in order to express the antigens or peptides or polypeptides of the invention in vivo, e.g., to induce antibodies.

[0088] A preferred embodiment of the invention relates to a pharmaceutical composition, wherein the nucleic acid according to the invention is comprised in a vector and/or a cell. Vectors and cells suitable in the context of the present invention are described above. Vectors are particularly employed for a DNA vaccine. An appropriate vector for delivery may be readily selected by one of skill in the art. Exemplary vectors for in vivo gene delivery are readily available from a variety of academic and commercial sources, and include, e.g., adeno-associated virus (International patent application No. PCT/US91/03440), adenovirus vectors (M. Kay et al., Proc. Natl. Acad. Sci. USA, 91:2353 (1994); S. Ishibashi et al., J. Clin. Invest., 92:883 (1993)), or other viral vectors, e.g., various poxviruses, vaccinia, etc. Recombinant viral vectors, such as retroviruses or adenoviruses, are preferred for integrating the exogenous DNA into the chromosome of the cell.

[0089] In order to be able to overcome the diseases, a vaccination may not be suitable or not possible due to the advanced and/or fast disease progression. Thus it would be very beneficial to provide monoclonal or polyclonal antibody therapies which target antigenic proteins of E. faecalis and have the potential to support a therapy of an infection or eliminate the pathogen and the disease altogether.

[0090] Therefore, another subject of the invention relates to an antibody or functional active fragment thereof which binds specifically to the antigen of the invention.

[0091] In a preferred embodiment the antibody is a monoclonal, polyclonal, chimeric or humanized antibody or functional active variant thereof. In another preferred embodiment the functional active fragment comprises a Fab fragment.

[0092] Antibodies generated against the antigens, fragments or variants thereof of the present invention can be obtained by direct injection of the antigens, fragments or variants thereof into an animal or by administering the antigens, fragments or variants thereof to an animal, preferably a non-human. The antibody so obtained will then bind the antigens, fragments or variants. Such antibodies can then be used to isolate reactive antigens, fragments or variants thereof from tissue expressing those.

[0093] For preparation of monoclonal antibodies, any technique known in the art, which provides antibodies produced by continuous cell line cultures, e.g. a hybridoma cell line, can be used.

[0094] Techniques described for the production of single chain antibodies (U.S. Pat. No. 4,946,778) can be adapted to produce single chain antibodies to the antigens, fragments or variants thereof according to this invention. Also, transgenic mice or other organisms such as other mammals may be used to express humanized antibodies to antigens, fragments or variants thereof according to this invention.

[0095] Still another subject of the invention relates to a hybridoma cell line which produces the antibody of the invention.

[0096] Hybridoma cell lines expressing desirable monoclonal antibodies are generated by well-known conventional techniques. The hybridoma cell can be generated by fusing a normal-activated, antibody-producing B cell with a myeloma cell. In the context of the present invention the hybridoma cell is able to produce an antibody specifically binding to the antigen of the invention.

[0097] Similarly, desirable high titer antibodies are generated by applying known recombinant techniques to the monoclonal or polyclonal antibodies developed to these antigens (see, e.g., PCT Patent Application No. PCT/GB85/00392; British Patent Application Publication No. GB2188638A; Amit et al., Science, 233:747-753 (1986); Queen et al., Proc. Natl. Acad. Sci. USA, 86:10029-10033 (1989); WO 90/07861; Riechmann et al., Nature, 332:323-327 (1988); Huse et al., Science, 246:1275-1281 (1988)).

[0098] The present invention also provides a method for producing an antibody according to the invention, characterized by the following steps:
[0099] (a) administering an effective amount of the peptide according to the invention to an animal; and
[0100] (b) isolating the antibody produced by the animal in response to the administration of step (a) from the animal.

[0101] Another subject of the invention relates to a method for producing an antibody according to the invention, characterized by the following steps:
[0102] (a) contacting a B cell with an effective amount of the peptide according to the invention;
[0103] (b) fusing the B cell of step (a) with a myeloma cell to obtain a hybridoma cell; and
[0104] (c) isolating the antibody produced by the cultivated hybridoma cell.

[0105] More particularly, the antibody may be produced by initiating an immune response in a non-human animal by administrating a peptide of the invention to an animal, removing an antibody containing body fluid from said animal, and producing the antibody by subjecting said antibody containing body fluid to further purification steps. Alternatively, the antibody may be produced by initiating an immune response in a non-human animal by administrating an antigen, fragment or variant thereof, as defined in the present invention, to said animal, removing the spleen or spleen cells from said animal and/or producing hybridoma cells of said spleen or spleen cells, selecting and cloning hybridoma cells specific for said antigen, fragment or variant thereof and producing the antibody by cultivation of said cloned hybridoma cells.

[0106] In a preferred embodiment the antibody produced according to a method of the invention is additionally purified. Methods of purification are known to the skilled artisan.

[0107] The antibody may be used in methods for treating an infection. Accordingly, still another subject of the invention relates to a pharmaceutical composition comprising the antibody of the invention. The pharmaceutical composition may encompass further components as detailed above. The composition may further encompass substances increasing their capacity to stimulate T cells. These include T helper cell epitopes, lipids or liposomes or preferred modifications as described in WO 01/78767. Another way to increase the T cell stimulating capacity of epitopes is their formulation with immune stimulating substances for instance cytokines or chemokines like interleukin-2, -7, -12, -18, class I and II interferons (IFN), especially IFN-gamma, GM-CSF, TNF-alpha, flt3-ligand and others.

[0108] Still another subject of the invention is a pharmaceutical composition, especially a vaccine, comprising the protective peptide or the nucleic acid or the antibody or functional fragments thereof as defined by the invention, useful for the immunization of a subject against an infection or the treatment of a subject having an infection, wherein the infection is preferably caused by E. faecalis.

[0109] In another aspect of the invention the peptide or the nucleic acid of the invention is used for the manufacture of a medicament for the immunization or treatment of a subject, preferably against E. faecalis. Alternatively, the peptide or the nucleic acid of the invention is used in a method of immunizing or treating a subject in need thereof, wherein an effective amount of the peptide or the nucleic acid of the invention is administered to the subject. The subject may be immunized in order to prevent an infection, particularly an E. faecalis infection, or may be treated to ameliorate or cure an infection, particularly an E. faecalis infection. The determination of the effective amount to be administered is within the knowledge of the skilled practitioner. Exemplary amounts are mentioned below.

[0110] The peptides or the nucleic acids of the invention are generally useful for inducing an immune response in a subject. The pharmaceutical composition (vaccine) used for immunization may be administered to a subject susceptible to infection by E. faecalis, preferably mammals, and still more preferably humans, in any conventional manner, including oral, intranasal, intramuscular, intra-lymph node, intradermal, intraperitoneal, subcutaneous, and combinations thereof, but most preferably through subcutaneous or intramuscular injection. The volume of the dose when subcutaneous or intramuscular injection is the selected administration route is preferably up to about 5 ml, still more preferably between 0.3 ml and 3 ml, and most preferably about 0.5 to 1 ml. The amount of protein comprising the antigen in each dose should be enough to confer effective immunity against and decrease the risk of developing clinical signs resulting from E. faecalis infection to a subject receiving a vaccination therewith. Preferably, the unit dose of protein should be up to about 5 μg protein/kg body weight, more preferably between about 0.2 to 3 μg, still more preferably between about 0.3 to 1.5 μg, more preferably between about 0.4 to 0.8 μg, and still more preferably about 0.6 μg. Alternative preferred unit doses of protein could be up to about 6 μg protein/kg body weight, more preferably between about 0.05 to 5 μg, still more preferably between about 0.1 to 4 μg. The dose is preferably administered 1 to 3 times, e.g. with an interval of 1 to 3 weeks. Preferred amounts of protein per dose are from approximately 1 μg to approximately 1 mg, more preferably from approximately 5 μg to approximately 500 μg, still more preferably from approximately 10 μg to approximately 250 μg and most preferably from approximately 25 μg to approximately 100 μg.

[0111] In still another aspect of the invention the antibody of the invention or functional fragment thereof is used for the manufacture of a medicament for the treatment of an infection, preferably an E. faecalis infection. Alternatively, the antibody of the invention is used in a method of treating a subject in need thereof, wherein an effective amount of the antibody of the invention is administered to the subject. The subject may be treated to ameliorate or cure an infection, particularly an E. faecalis infection. The determination of the effective amount to be administered is within the knowledge of the skilled practitioner. Exemplary amounts are mentioned below.

[0112] The treatment involves administering an effective amount of an antibody of the invention to a subject, preferably a mammal, more preferably a human. Thus, antibodies against the antigens, fragments or variants thereof of the present invention may be employed to inhibit and/or treat infections, particularly bacterial infections and especially infections arising from E. faecalis.

[0113] An “effective amount” of a peptide, nucleic acid or an antibody of the invention may be calculated as that amount capable of exhibiting an in vivo effect, e.g. preventing or ameliorating a sign or symptom of infection, particularly E. faecalis infection. Such amounts may be determined by one of skill in the art. Preferably, such a composition is administered parenterally, preferably intramuscularly or subcutaneously. However, it may also be formulated to be administered by any other suitable route, including orally or topically. The selection of the route of delivery and dosage of such therapeutic compositions is within the skill of the art.

[0114] Treatment in the context of the present invention refers to both therapeutic treatment and prophylactic or preventative measures, wherein the object is to prevent or slow down (lessen) the targeted pathologic condition or disorder. Those in need of treatment include those already with the disorder as well as those prone to have the disorder or those in whom the disorder is to be prevented.

[0115] Another subject of the invention relates to a method of diagnosing an E. faecalis infection comprising the steps of:
[0116] (a) contacting a sample obtained from a subject with the peptide according to the invention; and
[0117] (b) detecting the presence of an antibody against E. faecalis in the sample.

[0118] The peptides of the invention may be used for the detection of the E. faecalis. Preferably such detection is for diagnosis, more preferable for the diagnosis of a disease, most preferably for the diagnosis of an E. faecalis infection. The peptides or polypeptides may be used to detect the presence of an E. faecalis-specific antibody or fragment thereof e.g. in a sample obtained from a subject. The sample may be e.g. a blood sample. Alternatively, the presence of an E. faecalis-specific antigen can be detected using an antibody of the invention.

[0119] Accordingly, an alternative method of diagnosing an E. faecalis infection comprises the steps of:
[0120] (a) contacting a sample obtained from a subject with the antibody according to the invention; and
[0121] (b) detecting the presence of an antigen of E. faecalis in the sample.

[0122] The present invention also relates to diagnostic assays such as quantitative and diagnostic assays for detecting levels of the peptides or antibodies of the present invention in cells and tissues or body fluids, including determination of normal and abnormal levels. Assay techniques that can be used to determine levels of a peptide or an antibody, in a sample derived from a host are well known to those of skill in the art. Such assay methods include radioimmunoassays, competitive-binding assays, Western Blot analysis and ELISA assays (Enzyme-linked Immunosorbent Assays). Among these, ELISAs frequently are preferred. An ELISA assay initially comprises preparing an antibody specific to the peptide, particularly the antigen, preferably a monoclonal antibody. In addition, a reporter antibody generally is prepared which binds to the monoclonal antibody. The reporter antibody is attached to a detectable reagent such as radioactive, fluorescent or enzymatic reagent, such as horseradish peroxidase enzyme.

[0123] The peptides or antibodies of the present invention may also be used for the purpose of or in connection with an array. More particularly, at least one of the peptides or antibodies of the present invention may be immobilized on a support. Said support typically comprises a variety of antigens and fragments thereof whereby the variety may be created by using one or several of the peptides or antibodies of the present invention. The characterizing feature of such array as well as of any array in general is the fact that at a distinct or predefined region or position on said support or a surface thereof, a distinct polypeptide is immobilized. Because of this any activity at a distinct position or region of an array can be correlated with a specific polypeptide. The number of different peptides or antibodies of the present invention immobilized on a support may range from as little as 10 to several 1000 different peptides or antibodies of the present invention.

[0124] The manufacture of such arrays is known to the one skilled in the art and, for example, described in U.S. Pat. No. 5,744,309. The array preferably comprises a planar, porous or non-porous solid support having at least a first surface. Preferred support materials are, among others, glass or cellulose. It is also within the present invention that the array is used for any of the diagnostic applications described herein. Apart from the peptides or antibodies of the present invention also the nucleic acid molecules according to the present invention may be used for the generation of an array as described above.

[0125] In a last aspect, the peptide according to the invention is used for the isolation and/or purification and/or identification of an interaction partner of the peptide (a ligand), wherein the isolation and/or purification and/or identification of the ligand may be carried out as detailed below or as known to the person skilled in the art. In a preferred embodiment of the invention an affinity device may be used. The affinity device may comprise as least a support material and any peptide according to the present invention, which is attached to the support material. Because of the specificity of the peptides according to the present invention for their target cells or target molecules or their interaction partners, the peptides allow a selective removal of their interaction partner(s) from any kind of sample applied to the support material provided that the conditions for binding are met. The sample may be a biological or medical sample, including but not limited to, fermentation broth, cell debris, cell preparation, tissue preparation, organ preparation, blood, urine, lymph liquid, liquor and the like. The peptide may be attached to the matrix in a covalent or non-covalent manner. Suitable support material is known to the one skilled in the art and can be selected from the group comprising cellulose, silicon, glass, aluminum, paramagnetic beads, starch and dextrane.

[0126] More particularly, the isolation and/or purification and/or identification of the ligand may be carried out by contacting an isolated or immobilized peptide according to the invention with a candidate ligand under conditions to permit binding of the candidate ligand to the peptide, wherein the test system comprises a component capable of providing a detectable signal in response to the binding of the candidate ligand to said peptide; and detecting the presence or absence of a signal generated in response to the binding of the ligand to the peptide. The ligand may be an agonist or an antagonist.

[0127] Test systems for detection binding of a ligand are known to the skilled artisan and include e.g. binding assays with labeled ligand such as radioligands, fluorescence-labeled ligands or enzyme-labeled ligands.

[0128] The test compound can be any test compound either naturally occurring or chemically synthesized. Naturally occurring test compounds include in particular antibodies, preferably those showing similarity to the antibodies of the invention. In one preferred embodiment of the invention the test compound is provided in the form of a chemical compound library. Chemical compound libraries include a plurality of chemical compounds and have been assembled from any of multiple sources, including chemically synthesized molecules and natural products, or have been generated by combinatorial chemistry techniques. They are especially suitable for high throughput screening. They may be comprised of chemical compounds of a particular structure or compounds of a particular creature such as a plant.

[0129] The ligands identified may be employed, for instance, to inhibit diseases arising from infection with a member of the Enterococcus genus (Enterococci), especially E. faecalis and may therefore be formulated in a pharmaceutical composition.

[0130] The present invention is further illustrated by the following figures, examples and the sequence listing, from which further features, embodiments and advantages may be taken. It is to be understood that the present examples are given by way of illustration only and not by way of limitation of the disclosure.

[0131] FIGS. 1 to 21 demonstrate the protection achieved by active immunization with selected E. faecalis antigens in a rat model of catheter-induced endocarditis.

[0132] Table 1 shows the peptides of the present invention to be related to proteins from WO 04/106367.

[0133] Table 2 shows the DNA constructs made for expression of recombinant E. faecalis proteins prepared for assessing protection.

[0134] Table 3 shows the range of protection conferred by E. faecalis recombinant proteins in a rat model of catheter-induced endocarditis.

[0135] Table 4 presents all 46 E. faecalis strains utilized for PCR and sequencing of vaccine-antigen encoding ORFs.

[0136] Table 5 shows a summary on the sequence conservation of the selected 9 E. faecalis genes in forty-six isolates.

### FIGURES

[0137] FIGS. 1 to 21. Protection Achieved by Active Immunization with the E. Faecalis Antigens in a Rat Model of Catheter-Induced Endocarditis.

[0138] Male Sprague-Dawley rats immunized with recombinant E. faecalis proteins (each figure represents the data from one recombinant protein) were subsequently challenged i.v. with 1×10⁶-10⁷ CFU of E. faecalis strain OG1RF for induction of endocarditis. Enterococcus faecalis OG1RF in the vegetations of control rats versus OG1RF in the vegetations of recombinant protein immunized rats are depicted (significance determined by the unpaired t-test). Data are expressed as log 10 colony-forming units per gram recovered from vegetation homogenates ˜48 h post infection; the log 10 no. of colony-forming units per gram for vegetation were combined and averaged. Horizontal bars represent geometric means. Circles represent experiments where the challenge dose was 10⁶ cfu, and triangles represent challenge doses of 10⁷ cfu, or data where challenge dose of 10⁶ and 10⁷ were combined.

### EXAMPLES

### Example 1

### Identification of Enterococcus faecalis Antigens Eliciting Protective Immune Responses in a Rat Model of Catheter-Induced E. faecalis Endocarditis

### Experimental Procedures

### Cloning and Expression of Recombinant Enterococcal Proteins

### Cloning of Genes/DNA Fragments:

[0139] The gene/DNA fragment of interest was amplified from genomic DNA of E. faecalis (strain V583; serogroup CPS-C) by PCR using gene specific primers. Apart from the gene specific part, the primers had restriction sites that aided in a directional cloning of the amplified PCR product. The gene annealing (specific) part of the primer ranged between 15-30 bases in length. The PCR products obtained were digested with the appropriate restriction enzymes and cloned into the pET28b (+) or pET41b (+) vector (Novagen) for His-tagged proteins. The constructs are listed in Table 2. Once the recombinant plasmid was confirmed to contain the gene of interest, E. coli BL21 Star™ (DE3) cells (Invitrogen) that served as expression host were transformed.

### Expression and Purification of Proteins:

[0140] E. coli BL21 Star™ cells harboring the recombinant plasmid were grown into log phase in the required culture volume. Once an OD₆₀₀ₙₘ of 0.6 was reached the culture was induced with 0.5 mM IPTG for 3 hours at 37° C. The cells were harvested by centrifugation, lysed by a combination of the freeze-thaw method followed by disruption of cells with Bug-buster®, (Novagen). The lysate was separated by centrifugation into soluble (supernatant) and insoluble (pellet) fractions. Depending on the location of the protein different purification strategies were applied. A) If the His-tagged protein was in the soluble fraction, protein purification was done by binding the supernatant to Ni-Sepharose beads (Ni-Sepharose™ 6 Fast Flow, GE Healthcare). Due to the presence of the hexa Histidine (6×HIS) at the C-terminus of the expressed protein, it bound to the Ni-Sepharose while the other contaminating proteins were washed from the column by wash buffer. The protein was eluted by 500 mM Imidazole in 50 mM Tris, 0.5 mM NaCl buffer at pH 8.0. The eluate was concentrated, assayed by Bradford for protein concentration and checked by SDS-PAGE and Western blot. B) If the protein was present in the insoluble fraction the pellet was solubilized in suitable buffer containing 8 M Urea and applied onto the Ni-NTA column under denaturing conditions (in buffer containing 8 M Urea) using the same materials and procedure as mentioned above. Contaminating proteins were washed from the column by wash buffer without urea. Refolding of the His-tagged protein was performed while the protein was immobilized on the Ni-NTA matrix. After renaturation, proteins were eluted by the addition of 500 mM Imidazole. The eluate was dialyzed to remove traces of urea and concentrated if the volume was large, checked by SDS-PAGE and measured by the Bradford method.

### Animal Protection Studies

### Animals:

[0141] Male Sprague-Dawley rats (150 g)

### Active Immunization:

[0142] 100 μg of recombinant protein combined with Freund's complete adjuvant (CFA) was injected subcutaneously, into the flank. Groups of six to ten rats were immunized with each antigen. Animals were boosted in the same area with the same amount of protein and adjuvant (Freund's incomplete adjuvant (IFA)), on days 14 and 28. Animals were monitored for any discomfort or lesions and were provided free access to food and water.

### Induction of Endocarditis:

[0143] One week following the final immunization, aortic valve endocarditis was produced in male Sprague-Dawley rats. The animals were anaesthetized using isoflurane for the placement of intravascular catheters. Hair was clipped at the surgical site and bupivicaine was administered (<1 ml/kg body weight) prior to performing surgery at this site. The right carotid artery was exposed, and a sterile polyethylene catheter was inserted via a small incision and advanced 4 cm into the left ventricle. Proper positioning of the catheter was ensured by sensing resistance and vigorous pulsation of the line. Blood was collected at the time of catheter placement and approximately 0.5 ml of immune sera was stored at −80° C. Following placement of the catheter, the catheter was heat-sealed and left in place during the course of the experiment and the skin was closed with sutures.

### Bacterial Challenge:

[0144] Twenty-four hours after catheterization, each rat was inoculated via tail vein with 10⁶-10⁷ colony forming units (CFU) (10× the infectious dose 50 (ID₅₀)) of E. faecalis strain OG1RF pre-mixed in 0.9% saline (0.2-0.4 ml volume). The animals were euthanized by CO₂ inhalation at 48 hours post-infection and the aortic valves examined. Vegetations were excised, weighed, and homogenized in 0.5 ml saline, and dilutions plated to BHI, BEA, and BHI+Rif100 agar for enumeration of CFU. Animals from which cultures of undiluted vegetations yielded no bacteria were considered to have had no induction of endocarditis. The number of infected and uninfected animals and of bacterial CFU recovered from non-immunized (control) versus immunized groups was compared to evaluate the protective effect of the antigens. Randomly picked colonies recovered from infected vegetations were also tested to re-confirm the identity of the infecting organism.

### Results

[0145] In the present invention, 20 E. faecalis antigens were tested in a rat catheter-induced endocarditis model. Groups of 6-10 rats were immunized with individual E. faecalis recombinant proteins combined with CFA (first immunization) or IFA (second and third immunizations). Of these, nine E. faecalis antigens showed a high level of protection (60-100%). In particular, 100% protection was observed in rats immunized with EF2703-1, 90% was observed in rats immunized with EF0032-2, 86% protection was observed in rats immunized with EF3177, and 71% protection was observed in rats immunized with either EF0792-1, EF1277, or EF3256-1.67% protection was observed for EF0270-2 and EF1060-1 and 62% protection was observed in rats immunized with EF3207. Partial protection (40-50% protection) was observed for seven proteins; EF0428, EF3051-1, EF1093-1, EF0779-2, EFC0034-1, EFA0042-1, and EF3183-1. Four proteins, EF1355, EF1026, EF1032 IB, and EF1692 appeared to show minimal protection (17-40%) (Table 3).

TABLE 2
DNA constructs made for heterologous expression. The protein name corresponds to the
nomenclature of the genes derived from the genome of E. faecalis strain V583.
The restriction sites (RE) used for cloning and the position (start/stop) of the
amplicon are indicated for each construct.

| | | | | DNA | Protein | SEQ ID NO |
|---|---|---|---|---|---|---|
| Construct | Protein | Vector | RE | (start/stop) | (start/stop) | (DNA, protein) |
| 1 | EF0032-2 | pET28b (+) | NcoI/XhoI | 1381/2613 | 461/871 | 1, 21 |
| 2 | EF0270-2 | pET28b (+) | NcoI/XhoI | 1348/1896 | 450/632 | 2, 22 |
| 3 | EF0428 | pET28b (+) | NcoI/XhoI | 1/1110 | 1/370 | 3, 23 |
| 4 | EF0779-2 | pET28b (+) | NcoI/XhoI | 970/1785 | 324/595 | 4, 24 |
| 5 | EF0792-1 | pET28b (+) | NcoI/XhoI | 115/657 | 39/219 | 5, 25 |
| 6 | EF1026 | pET28b (+) | BspHI/XhoI | 1/810 | 1/270 | 6, 26 |
| 7 | EF1032 IB | pET28b (+) | NcoI/XhoI | 1/2235 | 1/745 | 7, 27 |
| 8 | EF1060-1 | pET28b (+) | NcoI/XhoI | 82/1659 | 28/553 | 8, 28 |
| 9 | EF1093-1 | pET28b (+) | NcoI/XhoI | 97/1782 | 33/594 | 9, 29 |
| 10 | EF1277 | pET28b (+) | BspHI/XhoI | 1/480 | 1/160 | 10, 30 |
| 11 | EF1355 | pET28b (+) | NcoI/XhoI | 1/1617 | 1/539 | 11, 31 |
| 12 | EF1692 | pET28b (+) | NcoI/XhoI | 1/564 | 1/188 | 12, 32 |
| 13 | EF2703-1 | pET28b (+) | NcoI/XhoI | 88/1122 | 30/374^{a} | 13, 33 |
| 14 | EF3051-1 | pET28b (+) | AflIII/XhoI | 109/765 | 37/255 | 14, 34 |
| 15 | EF3177 | pET28b (+) | NcoI/XhoI | 1/789 | 1/263 | 15, 35 |
| 16 | EF3183-1 | pET28b (+) | AflIII/XhoI | 76/1074 | 26/358 | 16, 36 |
| 17 | EF3207 | pET28b (+) | AflIII/XhoI | 1/972 | 1/324^{b} | 17, 37 |
| 18 | EF3256-1 | pET28b (+) | NcoI/XhoI | 73/927 | 25/309^{c} | 18, 38 |
| 19 | EFA0042-1 | pET41b (+) | NcoI/XhoI | 121/801 | 41/267 | 19, 39 |
| 20 | EFC0034-1 | pET41b (+) | NcoI/XhoI | 10/1341 | 4/447^{d} | 20, 40 |

^{a}The residue Lysine at position 39 relative to the native protein was changed to an Isoleucine according to the sequence confirmation of the expression construct.
^{b}The residue Phenylalanine at position 40 relative to the native protein was changed to a Leucine according to the sequence confirmation of the expression construct.
^{c}The residue Lysine at position 237 relative to the native protein was changed to a Glutamic acid according to the sequence confirmation of the expression construct.
^{d}The residue Phenylalanine at position 236 relative to the native protein was changed to a Tyrosine according to the sequence confirmation of the expression construct. Mutations could be due to PCR amplification or be mutations in the particular V583 strain used for PCR amplification; SEQ ID NOs: 41-44 are fragments corresponding to the cases described under a-d, where such differences are not present.

TABLE 3
Protection conferred by E. faecalis recombinant proteins in a rat
model of catheter-induced endocarditis. Sprague-Dawley rats
(6-10 rats per group) were immunized subcutaneously with
100 μg of the respective recombinant protein cloned from
E. faecalis strain V583 adjuvanted with CFA/IFA. Rats were then
challenged intravenously with 10⁶-10⁷ CFU of E. faecalis
strain OG1RF. Rats with sterile cultures of undiluted vegetation
homogenates were considered to have had no induction of
endocarditis and therefore were protected. Fisher's exact test
was used to derive p values by comparing total number of
infected/non-infected by OG1RF versus infected/non-infected
by OG1RF + recombinant protein.

| | Protection | p-values of | |
|---|---|---|---|
| | (% animals in | protection | p-values of CFU |
| | which no | (infected vs. non- | treated vs. |
| Recombinant | infection was | infected) (Fisher's | untreated |
| proteins | detected) | exact test) | (unpaired t-test) |
| EF2703-1 | 6/6 (100%) | 0.0001 | <0.0001 |
| EF0032-2 | 9/10 (90%) | 0.0008 | 0.0002 |
| EF3177 | 6/7 (86%) | 0.0004 | 0.0001 |
| EF0792-1 | 5/7 (71%) | 0.0037 | 0.0044 |
| EF1277 | 5/7 (71%) | 0.0037 | 0.0045 |
| EF3256-1 | 5/7 (71%) | 0.0037 | 0.0112 |
| EF0270-2 | 4/6 (67%) | 0.0450 | 0.0424 |
| EF1060-1 | 4/6 (67%) | 0.0116 | 0.0113 |
| EF3207 | 5/8 (62%) | 0.0079 | 0.0049 |
| EFC0034-1 | 3/6 (50%) | 0.0631 | 0.0326 |
| EFA0042-1 | 3/6 (50%) | 0.0631 | 0.0315 |
| EF0428 | 3/6 (50%) | 0.2786 | 0.2305 |
| EF3051-1 | 3/6 (50%) | 0.0631 | 0.0813 |
| EF3183-1 | 3/6 (50%) | 0.0631 | 0.2920 |
| EF1093-1 | 3/7 (43%) | 0.1336 | 0.0367 |
| EF0779-2 | 3/7 (43%) | 0.0938 | 0.0072 |
| EF1355 | 2/6 (33%) | 0.2341 | 0.2394 |
| EF1026 | 2/7 (28%) | 0.6080 | 0.1468 |
| EF1692 | 1/6 (17%) | 1.0000 | 0.7784 |
| EF1032 IB | 1/6 (17%) | 1.0000 | 0.6286 |
| adjuvant-only | 1/6 (17%) | 1.0000 | 0.7528 |
| negative control | | | |

DNA sequences:
Construct 1: EF0032-2
(SEQ ID NO 1)
ATGGTCACTGGTATTTTAGATGATTGGAACTACGCATCACGCAGCTTGTATTCTGAGCCTTATCCTGACTTAAAA
AATCTAGTCGATCAAACAAAAAAAGAAAATGATACCTTTTACCGCTTGGAAAATTTAAATGGTGTTTCGGCCAAT
GACGGCATTAACTATGGCTACAGTGGCATTAGCATGTTTTCTTCCGTACGGAACCGACATTCTTCAACATACCTA
AACGCCTTAGGTTTCCGCTCACGAGGCACGAATTTAAATATTCGTTACCAAAATAATACCTTGTTAATGGATGCT
TTGATGGGCATTAAATACAATATTGCTGAAAACAATCCAATGAAATTCGGCTTTGAGCGACAAGCTGCTGCTGGT
AAATATCAGCTTTATCGTAACGAAAATGCTTTGCCGTTAGGATTTTTAGCAGACAAAGAGATTTACAATGTCCGG
CAACCTCTCAATGATAATTTAGGTAGTCAAACAAATTTACTAAATGCTTTAGCCAATACTAATGAACGGTATTTT
ACCTTTTATCAACCAACGATGACGCTTCAAAATAACGTGACAATTACGCAAAATACAGCTGGCGTAACTTTTACG
GAGAAACAACATAACGTAGCCAAAGAGATTTCTTATACAGTCAATGTGCCCGCCAATACGCAAGCTTATTTGAGT
TTATTCCCAACGGATTTTGCTCAATTGGAAAGTTCCACTGCGACGGTCACCGTGAACGGCTCAAGTCAGCAATCA
CAAATTGGCATTACTGGCCAATATTATAACTTAGGTTACTATCCCAAAGATACAACCGTTAACTTCAAAGTAAGT
TTTTATGGAACCAAAGCAGTAAGTTTTGTTCAGCCGCAAGTGGTTGGCTTAAATACCAATGCATTTGAAAAAGCC
ATTTCCGCCGTGCAAGAAAAAGGCGTTGATTTAACAACTGGCAAACGCTCTGCTTCAGGTACCTTTACCGCCGAC
AAAGATCAAGTACTCGTCACTACAATTCCTTATGACAAAGGTTGGCGTGTCAAAATTGATGGCAAAAAAGTTACC
CCAAAAGCCTTTAAAGATGCCTTTCTAAGCGTTCCTGTCAGCGCTGGAACCCATACTATTCAGTTCTCTTATTTA
CCAGAAGGATTGATTCCTGGCATCGTGTTATTCGTTCTATGTACTGGTGGTTTCGTTGCCTACGTAACCTTGATT
CCTGCTAGACGAAACCGTAAAAAAGAAGACAAA
Construct 2: EF0270-2
(SEQ ID NO 2)
GCCATTGCAGCGGTCGTTGGTTTTGGTCTAACATTCTTCTTCTGGAAAGACAATACAGTTGAGGAAGAAGAAGTG
ATTATTGATAAAACAACGATTAAAAAAGAAAATATTACAAGTCCAGTCAAAGGACGAGTGTTATCTTTAAAAAAT
GCAGAGGATCCTGCTTTTGCAAATGGAGCATTAGGAAATGGGGTCGTGATTGAACCAACGGAAGGTAAAGTGGTT
GCACCCTTTGATGGAACGATTGTCACACTATTCCCAACAAAACATGCATTAGGTTTGATTTCAGATAACGGCACA
GAATTATTGATTCATATTGGGATTGATACAGTTCAATTAGAAGGCGAAGGCTTTGAAGCTTTTGTAAAACAAGGT
GACCGCGTGAAAAAAGGTCAAACATTAGTAACCTTTGATTTAGAAGGAATTAAAAAAGCTGGGTTTAGTACACAA
ATTCCAATCGTTGTGACGAATACAGCGGATTATTTAGATATTTTGGAAGTCGGCAGTAATGAAGTTTCAACAAGT
GATGATTTGCTGACCGCTTTAATA
Construct 3: EF0428
(SEQ ID NO 3)
TTGCCGATGATTATTAAACAGGAACAATTCATACCAAAAGATACAGTAGAAACAACGATTGACTTATTAATTAGA
AATTTAACAACGATTAAAGATAACACAGGTGAATTTCTGTTAGATTTTGATGGTTTAAAAGTTGATGACAAAAGT
TGGACGATTTGGAACTGGCCGCAAGGCGTTGGGTTGTATGGTATATATAAGAATTATCGAAATACTAAAAGTGAA
AAAGCTTTACAAGTAGTTAACGACTGGTTTGAAGGTCGGATGCAAGAAGGCGCGCCGCCTAAGAATGTGAATACG
ATGGCTCCGCTTTTAACAATGGCTTATCTATATGAAGACACTAAAGACTCTAAATATATACCTTACTTAGAGCAA
TGGGCGGAATGGGTGATGGAAGAAATGCCCCGAACGAATGAAGGTGGCTTGCAACATGCGACATATGGACCAGAA
AATAAAAATCAATTATGGGATGATACGTTAATGATGACTGTCTTACCTTTGGCAAAAATTGGTAAGTTGTTGAAT
CGACTCGATTATTTGGAAGAAGCAAAGCATCAATTTTTAATCCATATTAAATATTTACAAGATAAAAAAAGTGGT
CTATGGTATCACGGTTGGACTTTTGAGGGAAATCATAACTATGCGGAAGCACTGTGGGCAAGAGGAAACTGCTGG
ATTACGATTGCTATTCCAGAAATTATTGAAATCTTAGAGTTGCCAAAAGGAGATAGTTTACGGGAATTTTTATTG
AGTACCCTCAATGCGCAAGTGGCAGCTTTAGCGAAATACCAAGATGAATCTGGTTTATGGCATACATTAATTAAT
GATTCAAATTCGTATTTAGAATCTTCTGCTACAGCGGGATTCGCTTATGGGATTTTAAAAGCGGTTCATAAAAAA
TATATTTCTTCTGAATATGAAGAAGTGGCAAACAAAGCAATTGCTGGCTTACTAAATGAGATTGATGAAACGGGA
GAAGTACAACATGTGTCAGTTGGTACAGGAATGGGTGATAATTTAGATTTTTATCGCACAATTGGAATGACAGCG
ATGCCTTATGGTCAATCATTAACAATCCTATGTTTGACTGAATTGCTTGTTTCTTATTGC
Construct 4: EF0779-2
(SEQ ID NO 4)
GGCTATATAATTTTCAACGCTGTTTACTTAACAGGGCTATTAGAATCAAAACCTTTGATTATTTCGCATCGAGGG
GTCACCAATAGTAATGGCGTACAAAATACCATTCCTGCTATGGAAAGAACCATTAAATTTAAACCAGATTATATT
GAAATTGATGTTCAAGAAACCAAAGACCATCAATTTGTTGTGATGCATGATGCAAACCTTCAAGAACTCGCCGGC
GTTGATGGCACGCCGCAAGAATTTACGTTGGCTGAATTAACAAAAATGACCGTTAAAGAAAATGGCCAAGAAGCA
CCAATTGCCAGTTTTGATGATTATTTAGCGAAAGCAAACCAAGCCAAACAAAAATTACTAGTAGAAATTAAAACG
TCTAAACAAGATAGTCAAGGTGCGCTTTCTAACTTTATTGAAAAATATGAACGTCCTCTGATAAAGAATAACCAT
CAGGTTCAATCTCTCGACTACAATGTGATCAAAGCGTTTAAAAAAGCCAAATCAAAAGTAAAAGTTAGTTTTATT
TTGCCCTATAATTTCACTTTTCCAGAAACACAAGCTGATTTGTATACAATGGAAGCTACTACGTTGAATGATACC
TTCATTTTAAAAGCTGACCAACAGAAAAAAGCAGTTTATGCTTGGACAGTTAATGACTCAGAGGTATTGAGTAAA
ATGCTCTTTATGGACGTTGCTGGAGTGATTACCGATGATTTGGAGTTAGTCAATGAAGAAGTCAATGACTTTGAA
AAAAATCCGTCGTATGCGGATCGTATTTTGCATTATATTTTTATGCTACCAAGTGTGGCTTCTCAA
Construct 5: EF0792-1
(SEQ ID NO 5)
TTAGCTCAAGGAAATCGTTTAGCCGTAGATCAATGGCAAGCGAATCAAGTGGTTTTATCAAAAGAGGCCAATAGT
AATTTAAATGTATCAGTGTTAGATGAAAACGTGAAAGAAACGATTTCAGGAGGCAAAATTGCACCGATTGGTCAA
CAATCTTTAGCCATCCGCCCAGCAGATGATAAAAAGGCTGAATTAACGAATGTTAGCTTATTTGGGATTGAAAAA
GAAAGTTTTTTAATGCCAAAAGTGATTGAAGGAAACGCATTTACTGATAAAAATCAAGTGATTGCTTCAGAAACA
TTGAAAAATCAAGGATTTAAAATTGGCGACAAATTAACTGCAGGGAAATATGATGAGCAATTAGAAATTGTCGGC
TTTATTTCTAAAAGTAGCTATAACATTGTGCCAGTTATTTACACTTCTCTGGATACTTGGCGGTCAATTAAATAT
GGTGACAATCCAGCAATGGCCAAAATGGTTAATGGTTTCATTGTTCGCAGCAAGGACAACACGGAAGTTAAAACG
ACTAATAAAGACAGCCAA
Construct 6: EF1026
(SEQ ID NO 6)
ATGAAAAAAGAGATCATTGTTTATACTATTTCCGATTCACTTGGAGAAACATCACAAAAATTGTTAGCTGCAGCA
AGCGCACAATATCCAGATATTTCTTTTCTTAATCGATACAATTTTTCTTTTGTCACAACAGAAGAAGAATTATTA
GAGATTTTAAAAGATGCCTTAAAAGATAAAGCCTTAGTTGTCAGTACATTAGTCAGTAAACAACTAATCACAGCG
GCGAAAGAATTTAGTGAACGAACAGGGTTGTTATATTTAGATTTAATGGCGCCATTTTTTGAATTAATTCAAGCG
AAAGCCGGAGTAGATCCTATTGAAGAGCCTGGACGACGCCACCAACTAGATCGTGCCTATTTTGATAAAATCTCA
GCGATTGAATTTGCTGTAAAATATGATGATGGCAAAAATCCTCAAGGGTTTCTTGATTCTGATATATTGTTGTTA
GGCGTTTCGCGGACCTCAAAGACGCCAGTCAGTATGTATTTAGCGAATCAAGGCTACCGCGTTTCTAACTTACCA
TTAATTCCAGAAGTTCCATTGCCGCCAATTTTGGAAGAAATGGATCCACAAAAAATGATTGGTTTAGTTTGTTCG
CCAGAAACATTAGGACAGATTCGTAGCAGTCGGTTGGCTTCCTTAGGTTTAGGTAATGAGACCAGTTATACCAAT
GTTGAACGGATTGAACAAGAATTAGCTTATGCCGAAGAGATTTTTGCGAAGTATGGCATCCCAGTGATTGATGTA
ACCGCAAAATCTGTCGAAGAAACAGCCTTTTTAATTAAAGAAAAACTAGATGAAAGAAAT
Construct 7: EF1032 IB
(SEQ ID NO 7)
ATGGAATGGATTGAAATTAAGCACGCAACACAAAATAATTTGAAGAATATCTCTGTCAATATCCCTAAAAAGCAA
CTAACTGTTGTTACTGGACTTTCGGGTTCAGGAAAGTCCTCCTTAGTATTTGACACATTAGCCGCTGAATCACGT
CGTGAACTAAATGATACATTTAGTTCGTTTGTTCAAAATTACTTACCCAAATATGGTCGTCCAGAAGTTGAAAAA
ATCGAGAATCTTCCTGTTGCAATTGTCATTGACCAGAAAAAAGTAGCAGGTAATTCTCGTTCGACAGTGGGAACG
TACACAGATATTTATACGTTTTTACGTTTGCTGTTTTCACGAGCAGGTTCTCCATTTGTTGGTTATTCAGATACT
TTTTCGTTTAATCATCCGGATGGAAAATGTCCAACATGCGATGGCTTAGGAAAGATTACCGAAATCAATCTTCAT
CAGCTAGTTGATTATGACAAATCATTAAACAAAGGGCCTATCGATTTCCCCACATTTACAGTTGGCAACTGGCGG
TGGAAGCGTTATGCCCATAGTGGTCTATTTGATTTGGATAAAAAAATCAAGGACTATTCTCCTGAAGAGTTAGCA
TTATTTTTATATGCTCCACAACAAAAACTAGCTAATCCACCCAAAGAGTGGCCTCATACAGCTTTGTATGAAGGA
ATCGTCCCGCGTATGCAACGTAGCATATTGCATACAGACGAAGGCAAACGTCATCAAAAATACCTTAATCACTTT
GTTACCGTAAAAAGATGTCCTGATTGTTTAGGAAGTAGAGTCAATGAACGTGTTCGTAGCTGCAAAATTAATCAG
AAAAGTATTGCTGATGCTGTTGACATGCCACTCACTGAATTACATTCTTTTATTCGTTCAATGGACCTATCCTTA
ATAAAAACTATTCAAGAAGAGCTACTTGTACGTCTAGAAGCATTAATTAATATCGGTCTCTCCTACCTCACATTA
GGACGAGCAACTGAAACACTTTCTGGTGGTGAAGCACAGCGGATTAAAATTGCTAAGTATGTAAACAGCGCCTTA
AATGATATTATGTATATTTTAGATGAACCAAGTGCTGGCTTACATCCAAAGGACATCGAACGGATCAGTCGTGCA
TTGCTCAATTTAAAAAATAAAGGAAACACCGTGGTTCTCGTGGAACATAATCCACAATTAATTAGAGAAGCTGAT
TTTATCATCGATATCGGACCTTTCGCAGGCGAAAATGGTGGCCATGTCCAGTTTTCAGGAACGTATGACGCATTT
TTAGTCTCCAAAACCTTGACTAGTCAAGCGCTTCAAGAGCCGCTCCCTTTAAACGACCAACCAAGAAAAGCAAGG
AAGTCTTTATCAATCGAACATGCGACACTGCATAATTTAAACAATCTATCTGTCGAAGTTCCGTTAGGAGTTTTG
ACTGTTATTTGTGGGGTCGCTGGTTCAGGTAAATCATCATTAGCGGAAGAAATTTATCAAAAAGCCCAGGCTGAT
AACCAAGAAATTATTCATCTTTCACAAAAAAGCATTACCGCAAATTTACGATCCACACCTATGACCTATCTTAAT
ATTTTTGATAAGGTCCGCAAACTGTTTGCGGAAGAAAATCATGTTAGTCCAGCTTTATTTAGCTATAATTCCAAA
GGCGCCTGTCCTACTTGCAAGGGGAAAGGCATAATTGTCTCCGATATGTCTTTTATGGAGGATGTTACTAGTATT
TGCGAAACCTGTCACGGAACGCGTTACAAAGAAGAGGTGCTTCATTATCTGTATAACGGAAAAAATATCGTTGAA
GTACTAGCTTTAAGCGTTAAAGATGGCTATGATTTTTTCAAAGACCAGCCTTTTGCTCTTTCATTAAAAAATTTA
CTGGAAGTTGGCTTAAGCTATCTTAAACTCAATCAATCGCTCTCAACATTATCTGGTGGCGAATTGCAAAGGGTA
AAATTAGCAGACACACTTCACCAAAAAAAAGCTATCTATTTAATGGATGAACCTACAGATGGTTTACACTTAATT
GATATCCAACAAAGTCTTCAACTTTTCAATCGAATGGTAGAAGAAGGAAACAGCTTGATTTTATTAGAACATCAC
ATTGATGTGATTAAAAGTGCCGACTGGTTGATTGAACTAGGTCCCGAAGGTGGAAAAAATGGCGGACAGCTTCTT
TTTACAGGAACCCCAGCAAATATGCTAAATTCCACTCATTCTATTACTAAAGGCTATCTG
Construct 8: EF1060-1
(SEQ ID NO 8)
GATAGTAACAAAGCAGCGGAACAAAAAATTGCAATTAGTTCTGAAGCGGCTATTTCGACAATGGAACCACACACA
GCGGGGGATACGACCTCGACTTTAGTCATGAATCAAGTTTATGAAGGACTCTATGTTTTAGGTAAAGAAGATGAA
TTAGAGTTGGGGGTCGCTGCCGAAGAACCAGCGATTTCTGAAGATGAAACCGTTTATACATTTAAGATTAGAGAA
GATGCCAAATGGTCGAATGATGATCCAGTAACAGCAAACGACTTTGTTTATGCATGGCAACAAGTTGCTTCCCCT
AAATCAGGATCGATTCATCAAGCTTTATTTTTTGATGTCATTAAAAATGCTAAGGAAATTGCTTTAGAAGGCGCA
GATGTGAATACTCTTGGGGTTAAGGCGCTAGATGATAAAACGTTAGAAATAACTTTAGAACGGCCCACCCCTTAT
TTGAAATCATTACTTTCGTTTCCTGTTTTGTTTCCACAAAATGAAAAATATATCAAAGAACAAGGGGATAAATAT
GCTACTGATGCAGAACATTTGATTTATAATGGTCCTTTTAAATTGAAAGAATGGGATAATGCCTCTTCTGATGAC
TGGACCTACGAAAAAAATGATACGTATTGGGATGCTGAAAAAGTTAAATTAACAGAAGCGAAAGTTTCAGTAATT
AAGAGCCCAACGACAGCGGTGAATTTGTTTGACTCGAATGAATTGGATGTAGTGAATAAGCTAAGTGGTGAATTT
ATTCCTGGTTATGTTGATAATCCAGCCTTTCTTTCAATTCCTCAATTCGTCACATACTTTTTAAAAATGAACAGC
GTTCGTGATGGAAAAGAAAATCCGGCTTTAGCGAACAACAATATTCGTAAAGCGTTGGCACAAGCTTTTGATAAA
GAAAGTTTTGTAAAAGAAGTCTTGCAAGATCAATCAACGGCTACAGATCAAGTAATTCCGCCGGGACAAACGATT
GCGCCAGATGGAACAGATTTCACAAAACTAGCTGCTAAGAAAAATAACTACTTAACCTACGATACAGCGAAAGCA
AAAGAATTCTGGGAAAAAGGGAAAAAAGAAATTGGGCTGGATAAAATCAAATTAGAATTTTTAACAGATGATACA
GACAGCGCCAAAAAAGCTGCTGAGTTTTTCCAATTTCAATTGGAAGAAAATCTAGATGGATTAGAAGTGAATGTT
ACTCAAGTTCCTTTTACTATTCGTGTTGATCGTGATCAAACGAGAGACTATGATTTAGAATTATCTGGTTGGGGA
ACCGATTATCGTGATCCATTAACAGTTATGCGCATCTTTACTTCGGATAGTACCTTGGGCGGCGTAACGTTCAAG
AGTGATACGTATGATCAATTAATTCAAGAAACTAGAACAACACATGCGGCTGATCAAGAGGCTCGTTTAAATGAC
TTTGCTCAAGCACAAGATATTTTGGTGAATCAGGAAACGGTTTTAGCACCAATCTACAATCGAAGCATTTCTGTA
TTAGCTAATCAAAAAATCAAGGATCTGTATTGGCATTCATTTGGACCCACGTACAGTTTAAAATGGGCTTATGTT
AAC
Construct 9: EF1093-1
(SEQ ID NO 9)
GAAGAAAATGGGGAGAGCGCACAGCTCGTGATTCACAAAAAGAAAATGACGGATTTACCAGATCCGCTTATTCAA
AATAGCGGGAAAGAAATGAGCGAGTTTGATAAATATCAAGGACTGGCAGATGTGACGTTTAGTATTTATAACGTG
ACGAACGAATTTTACGAGCAACGAGCGGCAGGCGCAAGCGTTGATGCAGCTAAACAAGCTGTCCAAAGTTTAACT
CCTGGGAAACCTGTTGCTCAAGGAACCACCGATGCAAATGGGAATGTCACTGTTCAGTTACCTAAAAAACAAAAT
GGTAAAGATGCAGTGTATACCATTAAAGAAGAACCAAAAGAGGGTGTAGTTGCTGCTACGAATATGGTGGTGGCG
TTCCCAGTTTACGAAATGATCAAGCAAACAGATGGTTCCTATAAATATGGAACAGAAGAATTAGCGGTTGTTCAT
ATTTATCCTAAAAATGTGGTAGCCAATGATGGTAGTTTGAAAAAAGTAGGAACTGCTGAAAATGAAGGATTAAAT
GGCGCAGAATTTGTTATTTCTAAAAGCGAAGGCTCACCAGGCACAGTAAAATATATCCAAGGAGTCAAAGATGGA
TTATATACATGGACAACGGATAAAGAACAAGCAAAACGCTTTATTACTGGGAAAAGTTATGAAATTGGCGAAAAT
GATTTCACAGAAGCAGAGAATGGAACGGGAGAATTAACAGTTAAAAATCTTGAGGTTGGTTCGTATATTTTAGAA
GAAGTAAAAGCTCCAAATAATGCAGAATTAATTGAAAATCAAACAAAAACACCATTTACAATTGAAGCAAACAAT
CAAACACCTGTTGAAAAAACAGTCAAAAATGATACCTCTAAAGTTGATAAAACAACACCAAGCTTAGATGGTAAA
GATGTGGCAATTGGCGAAAAAATTAAATATCAAATTTCTGTAAATATTCCATTGGGGATTGCAGACAAAGAAGGC
GACGCTAATAAATACGTCAAATTCAATTTAGTTGATAAACATGATGCAGCCTTAACTTTTGATAACGTGACTTCT
GGAGAGTATGCTTATGCGTTATATGATGGGGATACAGTGATTGCTCCTGAAAATTATCAAGTGACTGAACAAGCA
AATGGCTTCACTGTCGCCGTTAATCCAGCGTATATTCCTACGCTAACACCAGGCGGCACACTAAAATTCGTTTAC
TTTATGCATTTAAATGAAAAAGCAGATCCTACGAAAGGCTTTAAAAATGAGGCGAATGTTGATAACGGTCATACC
GACGACCAAACACCACCAACTGTTGAAGTTGTGACAGGTGGGAAACGTTTCATTAAAGTCGATGGCGATGTGACA
GCGACACAAGCCTTGGCGGGAGCTTCCTTTGTCGTCCGTGATCAAAACAGCGACACAGCAAATTATTTGAAAATC
GATGAAACAACGAAAGCAGCAACTTGGGTGAAAACAAAAGCTGAAGCAACTACTTTTACAACAACGGCTGATGGA
TTAGTTGATATCACAGGGCTTAAATACGGTACCTATTATTTAGAAGAAACTGTAGCTCCTGATGATTATGTCTTG
TTAACAAATCGGATTGAATTTGTGGTCAATGAACAATCATATGGCACAACAGAAAACCTAGTTTCACCAGAAAAA
GTACCAAACAAACACAAAGGTACCTTACCTTCAACA
Construct 10: EF1277
(SEQ ID NO 10)
ATGAACATTTTTGCTGTCCGTTTAAAAGAGGCTTTAACAGCCAAGAACATCAAACCTAGTGATTTAGCGAAAAAA
ACTGGCATCGGTAAATCTTCGATCAGCGATTGGCTAGCTGGTCGTTACGAAGCAAAACAAGACAAAGTTTATCGC
ATTGCAGATGCATTAGACATTAATGAGGCCTGGTTGATGGGACAAGAAGTTCCCATGGAAAAAAATGCCTCAACT
ATCGACCGCATTTATAAAAAATTAGAACCCCAACGACAAGCCATCGTTTATCAATTTGCCGAACAACAATTACAC
GAACAACAAACGCAAGCAGAAATTCTCTCATTCCCTCGCCGTGACGAAATGACACTGGCTGCCCACGCTGGGGAT
CCAGAAAAGATATTTTCAAAAGAAGAGATCGAGAAAATTCACGATTACTTGGATGAAATTGATGCCAAATATCAA
CAATCGATTTCTTCTGACAAAAAAGAGGAT
Construct 11: EF1355
(SEQ ID NO 11)
ATGGCTTATCAGTTTAAATTACCGGATATCGGTGAAGGGATTGCCGAAGGCGAAATCGTTAAATGGTTTGTAAAA
CCTGGCGATACAATCAACGAAGACGATACGTTATTAGAAGTACAAAATGACAAATCAGTGGAAGAAATTCCATCA
CCAGTAACAGGTACTGTAAAAAATATCGTTGTACCAGAAGGAACAGTTGCAAACGTTGGTGACGTGTTAATCGAA
ATCGACGCACCTGGTCACGAAGATAACGATGCAGCACCAGCAGCTCCTGCACAAGAACAAACACCAGCACAACCT
GCTGCTGTACCAACAACCGAAGCAGCTGGCGGATTTTTCCAATTCAAATTACCAGACATCGGTGAAGGAATTGCC
GAAGGCGAAATCGTTAAATGGTTCGTTAAAGCGGGCGACACAATTAATGAAGATGATTCATTATTAGAAGTACAA
AATGACAAATCAGTAGAAGAAATTCCATCACCAGTAACAGGTACTGTAAAAAATATCGTTGTACCAGAAGGAACA
GTTGCCAATGTGGGTGACGTGTTAGTTGAAATTGACGCACCTGGTCATAATTCAGCAGCACCGTCAGTCGCAGCA
CCAGCTACTGACGCTCCTAAAGCGGAAGCATCAGCTCCAGCCGCTTCAACAGGCGTAGTTGCAGCCGCTGATCCA
AACAAACGCGTTTTAGCAATGCCATCTGTTCGTCAGTATGCGCGTGAAAAAGACGTTGATATTACACAAGTAACT
GCAACTGGTAAAGGTGGCCGTGTCATTAAAGCGGATATTGATGCCTTTGTCTCTGGTGGTTCTCAAGCAGCCCCA
GCTACTGAAGCTGCCGCAACAGAAGCAGCACCTAAAGCGGAAGCAGCTGCACCTAAAGCAGCGCCAAAAGCCTTT
ACTTCTGATTTAGGCGAAATGGAAACACGTGAAAAAATGACACCAACACGTAAAGCAATTGCTAAAGCAATGGTT
AACAGCAAACACACTGCTCCTCACGTAACATTACATGATGAAGTAGAAGTTTCTAAATTATGGGATCACCGTAAG
AAATTTAAAGATGTTGCTGCTGCAAATGGTACAAAATTAACATTCTTACCATACGTTGTAAAAGCATTGACTTCA
ACTGTTCAAAAATTCCCAATCTTGAATGCATCAATCGATGACGCAGCACAAGAAATTGTTTACAAAAATTACTTT
AACATTGGTATCGCTACTGATACAGATCATGGCTTATATGTACCAAATGTTAAAAATGCTAATACGAAGAGCATG
TTTGCTATCGCTGATGAAATCAACGAAAAAGCAGCATTGGCTATCGAAGGTAAATTAACTGCACAAGATATGCGT
GATGGTACAATCACAATTAGTAACATTGGTTCAGTCGGTGGCGGCTGGTTTACACCAGTAATCAACTACCCTGAA
GTTGCTATTTTAGGCGTTGGTACAATTGCACAAGAACCAGTTGTTAATGCAGACGGCGAAATCGTTGTGGGACGC
ATGATGAAATTATCATTAAGCTTTGACCACCGTATCGTTGACGGCGCAACTGCTCAAAAAGCAATGAACAACATT
AAACGCTTATTAGCTGATCCAGAATTACTATTAATGGAAGGA
Construct 12: EF1692
(SEQ ID NO 12)
ATGGCAAAACGAATTATCATTATGAACTTTGATATTGAAAGTAAATCGTACCAAGCATTTTCCGAAATAAAAAAG
ATGCAGGCAGAAAGACAGCTTAAAGGTGAGCAAATGGCGGTTGTTACGCATGTTAATGATGGCCAGCATCAATTT
AAAATCAATGATTTTATCGATTTTACAGGCAACAATCATACATCAAAAGATAGCATGATTGGGATGCTAGTAGGC
ATATTAGGTGGTCCTCTGGGCATTCTTTTTGGCTGGTTTGCTGGAAGTATGTATGGTGCAAGCAAAGACGCCAAA
GAAATTCAAGAAGCACAAACGGTTTTTGAACATGTGATTCAAAAGATTGATGAAGGACAAACGGGATTGTTATTA
ATTGCAGAAGAAGAAGACAACCGTCCGCTCAACCAATTGGTTATGTTTGACTTAGGTGGCGAAATCACGCGGCTT
GATTTAGAGGAAGTCCAACAAGAAATTAACGATGCGAACGAAGTTGCAAATGAAGCGAAACAATCGTGGCAAGCA
AAAAAAGAACAACACAAAGAAGCAACATCGAAAGAAGAA
Construct 13: EF2703-1
(SEQ ID NO 13)
GGTAGCTATTTAAAGAAAACAATTGATATAGGCTATGTTCCCATAAAAAATGATTATAATGAAGCGCAAAATAAA
GATAGTCAATCGTTTTTGATTATGGGGCTAGACAATACAATTGAACGGAAATTAGGCACAACTAGGACTGATGCT
ATGATGGTGATTACCGTGAATAACAAGACGAAGAAAATAACCTATTTAAGTTTGCCACGGGATAGTTTTGTTCAA
ATTGATGCGAAAAATTACCAAGGGATGCAGCGAATTGAAGCCGCCTATACCTACGATGGACCAACAGCTTCTGTT
AACACAGTTGAGAAATTATTGAATATTCCAATCAATCATTACGTTGTGTTTAACTTTTTATCTTTTATTAAGTTA
ATTGATGCGGTTGGCGGCATAGATGTCAATGTCAAGCAGGCGTTTGATGGTGTCACCAAAGACGGGCCAGGATCC
ATTCATTTTGATGCAGGGAAACAGCATTTAGATGGTACGAAAGCTTTATCTTATGCCCGTGAAAGACATAGCGAT
AACGATATTATGCGTGGATTCCGACAACAAGAAATTATTCAAGCAGTTGAAGACAAGTTGAAATCTGGTCAATCA
ATCATGAAAATAATGGACATTATTGATTCGTTAAATGGAAACATTCAAACTGATGTGGATTCCAATGAATTGACT
CATTTAGTCAAAGAAGGTTTGACTTGGACCAATTATGATAAACAACAGCTTTCTTTTGACTGGCGCACTTTTAGT
AATGAAGGGCGCAGTATGGTTGAACTATACCCAGATAGTATTGAAAATGTCCGTCATCAATTACGTGTGTCTTTA
AATTTAGAAAAGCCAGATGAACGAGATCAAGACGGCTATGTCTTCCATACGAACGGTGAATTTTTATATCAAAGT
GATTATACCGTTCAAGATGAAGCAGCTGAGGAAAACGAAATGACTTCCATCAACGGCAATACGTATATTGGTGTT
CCTGGTAATACACAGACCGGCCCGTTGCCATCAGTTAAAACGGAAAATGGCTTTATAAAA
Construct 14: EF3051-1
(SEQ ID NO 14)
TTTTCAAGTTGGTTTGATGATTCATATGTCAAAGCTAGTGCTGAATCAAGTAAAACAAAAGAACCAGCACCAGTT
AAAATTGAGAAAAAAGTCAAACCTTTAAGCTATGGACAACAGGTCAATCAAGAAATTGAAAAGAAGCAATATGAT
GGACATCTGGATTTGCCGTTAGAATTGCAGACAGATGCTAAATGGAAAGACACCGCATACGGATTTGGCAATGTG
GATAAGCCGAATACAATCGAAATTAATGGCTGTGCGATTGTATCGCTTGCAATGGTTGGTTCATACATGGATCAC
CAAGAAGTTACCCCTCTGGATGTGTTAGCTTGGGCAAAAAATGACTTCTTTATGGAAGGGCAAGGGACGGCGTGG
TCTATTTTTAGTGCATATGCTGAAATGAAAGGCTATAACTGTCAAGAAATTGGGGATATTGAAACAGTGGCAGCT
TTCTTGAAGGAAGGTCATCCAGTCATTATTTCTGTAAAACCGGGCTATTTCACTACAACTGGTCACATTATGGTG
ATGAGTGGTGTGGATGAAAAAGGCGATTTCTGGATTAATGATCCAAACGATTCAGAAGAAAAGGGCCATTCAAAA
CGGACATTTACAGCCGAAGAAGTGATGAATGAAGCGTTAAACTTCTGGGCATTTTAT
Construct 15: EF3177
(SEQ ID NO 15)
ATGGACTTACATTTAACCGTTGATCTAAAAAAAACAAAGACACTCATTGACTTAGCCGATCAGGCCCACTTAATC
ATTGAACAAACAACTAAATTACCGAAAAAAGAGGCAGCGATTCTTTTCTTGCTAATAGATAACCAACTAGTTGCT
TTAGGACTTGCTGAAGAAAAAGCTACATATAAAGAAGTTTCTTTTGATCACTCGATTTTATTGAAACCGACTTGG
GACACAGAACTTGCCTATTTAGCGCAAGCTTTCCTAGATGATGCGAAAGAAAGTGGTTTAACATTGGAAGCAACC
CCAACGACAGTCAAAATTCCGAAAAGTGCGGTAGCGACAGTGACTAACTATAAAGAAACAGTCACCTTTATCTTG
GAACGTTTTGGCTACTCTCTGTTTAAAAAACCGGCGCCGAAGAAAGCCAGACCAGCCAAAGCACGCCACAAATGG
ACAAAAGAAGTTAGCCAAATTCCTTTTTATATTGATACTCGACAAAGCAAAGCAACTGTTTTTTGGCAAAAGCGC
AATGAAATGCTTATTAAAGCTGGCGCGACAATGATGCCCGAAGCCCCTTTAAATAAAGACGGGTCTGTCGGTTTC
TCCGCTAGATTTGGTGAAAAACTTCGTGATGAACGCAAGGGCCAATTTAAAGACTTTGTCACAACGGAAGATATC
GTCTTAAAAAGCGTTAATGAAGTCGGCTTGTTTCTCTATTTTGCTGGAACAAACAGCTGGTTAGAGCTAGTTGAT
GAGAACGGCAAAACCTTAAATGAATGGACTGTGGTGGAA
Construct 16: EF3183-1
(SEQ ID NO 16)
TCTGAATTTAATTTTGCGGTCACACCAACAATTCCCGAAAATCAAGTGGATAAATCAAAAACCTACTTTGACTTA
AAAATGGCGCCTGGTGCCAAACAAACCGTAGAAATTCAGTTACGCAATGATACAGATGAAGACATTACCATTGAA
AATACGGTGAACTCAGCGACAACAAATTTAAATGGCGTAGTAGAATATGGCCAAAACGGGATCAAACCTGACAAA
ACCTTACGTTTTAACTTAAAAGATTATGTGGAAGCACCGAAAGAAATCATCTTGCCGAAGCATTCCCAAAAGACC
TTACCTTTAACCATTACGATGCCTAAAGATTCTTTTGATGGCGTGATGGCTGGCGGTATAACACTCAAAGAGAAA
AAGAAAGAAACAACGACTTCTGCGGATCAATCAAAAGGGTTAGCTATTAATAATGAATACTCCTATGTTGTGGCT
ATTATTCTTCAGCAAAATGAGACAAAGGTTCAACCAGATTTAAAATTACTGGGGGTTAAACCAGGCCAAGTCAAC
GCGCGAAACGTCATCAATGTTTCTTTACAAAACCCACAAGCGGCCTATTTAAACCAATTACATTTAATCAACACT
GTTTCAAAAGGAGGCGAAACGCTTTACCAATCCGATACTGAGGATATGCAAGTGGCGCCAAACTCTAACTTTAGT
TACCCAATTTCTTTAAAAGGGGAACGATTAACGCCAGGAAAATATGTCTTGAAATCAACGGCCTATGGTGTAAAA
GATGAAAAGGGCACCTATCAAGTCAAAGGCGCCAATGGTGAAGAACGGTACCTGTACAAATGGGAATTTACAAAA
GAATTTACTATTTCTGGGGACGTCGCTAAAGAATTAAATGAAAAAGACGTAACCATTAAAGGAACCAATTGGTGG
TTGTATCTACTGATTGCATTAATCATTCTAGCGCTGCTCTTATTGATTTTCTTCTTGTATCGTAAAAAGAAAAAA
GAGGAAGAACAACAATCTGAGCAA
Construct 17: EF3207
(SEQ ID NO 17)
ATGTCCAAGAATTTTTGGGCAACATTGCCAAAGCCCTTTTTTGTTTTAGCACCGATGGAAGATGTCACTGATGTG
GTCTTTCGTCATGTCGTGAAAGAAGCTGGGGCACCAGATGTGCTTTTTACAGAATTTACTAATTCGGATAGTTAT
TGTCATCCTGAAGGAAAAGATAGTGTACGCGGGCGCCTCGTTTTTACAGAAGATGAACAGCCGATGGTGGCACAT
ATTTGGGGGGATAAACCGGAATTTTTCCGTGAAATGAGTATCGGCGTAGCGGAGATGGGCTTTCAAGGGTTAGAC
ATAAATATGGGCTGTCCTGTGCCTAACGTGGCTGAGCGTGGAAAAGGCAGCGGGCTAATTTTGCGCCCAGAAGTC
GCGGCTGAATTGATTGACGCTGCCAAAGCAGGTGGCTTACCTGTTAGTGTCAAAACACGCATTGGGTTTACTGAA
ATGGCGGAAATGGAGGCGTGGATCACGCATTTATTAGAGCAAGACATTGCGAATCTATCCATTCATTTGCGAACA
CGAAAAGAGATGAGCAAAGTGGATGCCCATTGGGAGGTCATTCCGCAAATTATGGCTATTCGGGACCGTGTCGCA
CCGCAAACGACAATTACGATTAATGGGGATATTCCCGATCGTCAAAAGGGCCTAGAATTAGCAGAACAATATGGT
GTAGATGGCATCATGATTGGTCGGGGGATTTTTAAAAATCCTTATGCCTTTGAAAAAGAACCCAAAACACATACG
CCACAAGAATTGCTGGGCTTGCTACGTTTACAATTGGATTTGCAAGACAAATATGCGGAATTGGTGCCTCGCTCC
ATCGTTGGGCTGCATCGCTTCTTTAAAATTTATGTCAAAGGCTTTCCAGGTGCCAGTGATTTAAGAGCACAATTA
ATGAATACAAAATCAACGGATGAAGTGCGCCAGTTGTTAGCGACGTTTGAAACAGAACATGGTGTGCTTGAC
Construct 18: EF3256-1
(SEQ ID NO 18)
GCAGACAAGAAAGACAACACAACGAACTCTTCTAGCGCAGCATCTTCAGAAACGAAAAAATCAACGGAATCATCA
GCACCAGCGAAAAAAGTTGCCGGTGGCGATTTAAAAGATGGTACGTATAAATTAGAAGAAAAAAATGAAAAAAAT
GGTTACCGTGCAGTCTTTGAAATGACTGTAAAAGACGGCAAAATCACTGAATCTAAATATGACAACATCAATGCT
GACGGCAAGTCTAAAACAGAAGACACTAAGTATGAAGAAAGCATGAAAGCAAAATCTGGTGTTGGACCAAAAGAA
TACATCAAACAATTAAACGATTCTTTTGTTAAAGCACAAAGCGCAAGCGGTGTGGAAGTAGTAACTGGTGCGACT
CATTCATCTGAATCATTCCAAAACTACGCACAACAATTAATCCAAGCAGCACAAGCTGGTAACACAGACACAATC
GAAATCGACAATGGGGCAACATTGAAAGATGGTACGTACTCATTGAAAGAAAAAAATGACTCAAACGGCTACCAC
ACAACATTCTCAATGACTGTGAAAGATGGTAAAGTGACTGAATCTAACTACGATAACGTGAACGCTGACGGCAAA
TCTAAAAAAGATGACACTGAATACGAAAGCAAAATGGAAGACGTTGCTGGCGTTGGACCAAAAGAATATATCGAA
ACATTAAACAAAGAATTTGTTAAAGCAATGGGCGAAGAAGACGGATCACCTGCAGGTGTTGAAGTAGTAACTGGT
GCAACACACAGCACACATTCATTCATCAACTACGCACAACAATTAGTGAACGCTGCTGAAAAAGGCGACACAACT
GAAATCGTTGTTGACAACATCGTAACAAAA
Construct 19: EFA0042-1
(SEQ ID NO 19)
TTTGCACAAGAAATTATCCCTGATGATACTACGACACCGCCCATTGAAGTACCAACAGAACCAAGTACACCAGAA
AAGCCAACAGATCCAACACCGCCAATTGAGCCACCTGTAGACCCTGTAGAGCCACCTATTACACCAACGGAGCCA
ACAGAACCGACAGAGCCGACAACACCAACAGAACCTGAAAAACCAGTAGTTCCAACGGAACCGACAACACCAACA
GAACCGACAACTCCTACAGAGCCAAGTGAACCAGAACAACCAACGGAGCCAAGTAAACCAGTAGAACCTGAAAAA
CCAGTTACACCAAGCAAACCAGCAGAACCCGAAAAACCTGTGACACCAACTAAACCAACAGAACCTGAAAAACCA
GTACAACCAGCAGAACCAAGCAAGCCAATCGACGTTGTTGTAACGCCAACAGGGGAATTAAATCACGCTGGAAAT
GGTACACAACAGCCAACAGTCCCTATTGAAACAAGTAATTTGGCAGAAATCACACACGTGCCAAGTGTAACAACA
CCTATTACAACTACAGACGGAGAAAACATTGTAGCTGTAGAAAAAGGTGTTCCACTTACACAAACAGCAGAAGGG
TTAAAACCTATTCAATCGAGTTACAAAGTATTGCCTAGCGGAAATGTAGAAGTAAAAGGTAAGGACGGTAAAATG
AAGGTTTTACCATACACA
Construct 20: EFC0034-1
(SEQ ID NO 20)
AATAAAAAAACACCAAAACCATTAACCCCACCCAAAGCCTTTTTTAACTGGTGTACTGCACAAATACCCACGTAT
GAATGGCAAAACAAAAAGGAGACAATTCTTGCGAGTTCTCGCAAGAATTGCCCTATCATAAAAAAACGATTAACA
AAATACTCACGATTATCGTTTCCAACGAAATTTTACTCCTTTGGAATCATTCTCGTTCGTGCAAAACGAATTGAA
ATTCAAACCCATAGTTATTGGCAGACGATTACAGATGGAATAGAAAACCTTATCTATGAGCCGTCAAACCTTGAA
CGGTTTTCAAACGATACCCATGTTAAAGCCCATTATGAGAACGGACATTGGCATGAGGGCTTGTTAGCAAATTAT
GGTTTTATGAGTAGTGCTTATACAAATACAGTATTCTATCCAAATAACTGGCAAGAAAAACTAACCACTGTATCG
GAATTAAAGTACTTACAGTTACCTGAAATAGAACGTCAAGAACTAGCTCATATTTACAAATACCGAAACGAAATT
GAGTTTTTACAAAAGATAGGTGCCACAACCTTAGCGAATGAAATCATTTTTGACGACTATCGCAACGTTTTTGGA
CTGTATTTTCATAAAGTAGATATGAGAGTAATTACTAAGAAATGGCTAAAAGCGAATAAACAAAAATTAAAAACA
AGAAATCCAACCTTTCATGAATACATGTTAGAAAAAACGTTAAAAGAGCGAAATGCGCCTATGATAAACGAAATA
GAAAAGTACGTGCATTATTCGCAAATTAAGCAACTACCGAAAGAAGTGAACTTAACAAAGTTTCAAAAATGGTTT
ATACGAAAAGGGGAGCGTTTTGACTATTATATGGACTATTTACACATGTTAGAAGAGTTGAACACCCCACTTAAT
AACGATAGTGTATTGTATCCTGAAAACTTACAAGTAGCTCACGATAACGCTATGAACACGCTAAACCTTTTGAAA
AGTGAGATTGAAGAAAAGCAGTATCAAGAACGGAAAAACCAAATTAAAGCGTTAGAAGCTGAAATTGACGATTTG
CTTTTTCTCACACCACATTCATTACAAGAAATCATTCAAGAAGGAAGTATTCTACGCCATTGTGTGGGCAGTCAA
CACTATATCGAACGGCATACGCAAGGAAAAACAACGATTGTTTTTATCCGAAGAAAAGAAAAGCCAGATATGCCT
TACTTCACATTAGAATATCGAAATCAACAGGTTATACAAATACAAGGAAAATGTAACCGTCAGGAAGTACCAGAA
AAGATAAAACAAGCAGTCAGACAATGGCAAGAGAATTTACAGCACGCCTTATCATCA
Protein sequences:
Construct 1: EF0032-2
(SEQ ID NO 21)
MVTGILDDWNYASRSLYSEPYPDLKNLVDQTKKENDTFYRLENLNGVSANDGINYGYSGISMFSSVRNRHSSTYL
NALGFRSRGTNLNIRYQNNTLLMDALMGIKYNIAENNPMKFGFERQAAAGKYQLYRNENALPLGFLADKEIYNVR
QPLNDNLGSQTNLLNALANTNERYFTFYQPTMTLQNNVTITQNTAGVTFTEKQHNVAKEISYTVNVPANTQAYLS
LFPTDFAQLESSTATVTVNGSSQQSQIGITGQYYNLGYYPKDTTVNFKVSFYGTKAVSFVQPQVVGLNTNAFEKA
ISAVQEKGVDLTTGKRSASGTFTADKDQVLVTTIPYDKGWRVKIDGKKVTPKAFKDAFLSVPVSAGTHTIQFSYL
PEGLIPGIVLFVLCTGGFVAYVTLIPARRNRKKEDK
Construct 2: EF0270-2
(SEQ ID NO 22)
AIAAVVGFGLTFFFWKDNTVEEEEVIIDKTTIKKENITSPVKGRVLSLKNAEDPAFANGALGNGVVIEPTEGKVV
APFDGTIVTLFPTKHALGLISDNGTELLIHIGIDTVQLEGEGFEAFVKQGDRVKKGQTLVTFDLEGIKKAGFSTQ
IPIVVTNTADYLDILEVGSNEVSTSDDLLTALI
Construct 3: EF0428
(SEQ ID NO 23)
LPMIIKQEQFIPKDTVETTIDLLIRNLTTIKDNTGEFLLDFDGLKVDDKSWTIWNWPQGVGLYGIYKNYRNTKSE
KALQVVNDWFEGRMQEGAPPKNVNTMAPLLTMAYLYEDTKDSKYIPYLEQWAEWVMEEMPRTNEGGLQHATYGPE
NKNQLWDDTLMMTVLPLAKIGKLLNRLDYLEEAKHQFLIHIKYLQDKKSGLWYHGWTFEGNHNYAEALWARGNCW
ITIAIPEIIEILELPKGDSLREFLLSTLNAQVAALAKYQDESGLWHTLINDSNSYLESSATAGFAYGILKAVHKK
YISSEYEEVANKAIAGLLNEIDETGEVQHVSVGTGMGDNLDFYRTIGMTAMPYGQSLTILCLTELLVSYC
Construct 4: EF0779-2
(SEQ ID NO 24)
GYIIFNAVYLTGLLESKPLIISHRGVTNSNGVQNTIPAMERTIKFKPDYIEIDVQETKDHQFVVMHDANLQELAG
VDGTPQEFTLAELTKMTVKENGQEAPIASFDDYLAKANQAKQKLLVEIKTSKQDSQGALSNFIEKYERPLIKNNH
QVQSLDYNVIKAFKKAKSKVKVSFILPYNFTFPETQADLYTMEATTLNDTFILKADQQKKAVYAWTVNDSEVLSK
MLFMDVAGVITDDLELVNEEVNDFEKNPSYADRILHYIFMLPSVASQ
Construct 5: EF0792-1
(SEQ ID NO 25)
LAQGNRLAVDQWQANQVVLSKEANSNLNVSVLDENVKETISGGKIAPIGQQSLAIRPADDKKAELTNVSLFGIEK
ESFLMPKVIEGNAFTDKNQVIASETLKNQGFKIGDKLTAGKYDEQLEIVGFISKSSYNIVPVIYTSLDTWRSIKY
GDNPAMAKMVNGFIVRSKDNTEVKTTNKDSQ
Construct 6: EF1026
(SEQ ID NO 26)
MKKEIIVYTISDSLGETSQKLLAAASAQYPDISFLNRYNFSFVTTEEELLEILKDALKDKALVVSTLVSKQLITA
AKEFSERTGLLYLDLMAPFFELIQAKAGVDPIEEPGRRHQLDRAYFDKISAIEFAVKYDDGKNPQGFLDSDILLL
GVSRTSKTPVSMYLANQGYRVSNLPLIPEVPLPPILEEMDPQKMIGLVCSPETLGQIRSSRLASLGLGNETSYTN
VERIEQELAYAEEIFAKYGIPVIDVTAKSVEETAFLIKEKLDERN
Construct 7: EF1032 IB
(SEQ ID NO 27)
MEWIEIKHATQNNLKNISVNIPKKQLTVVTGLSGSGKSSLVFDTLAAESRRELNDTFSSFVQNYLPKYGRPEVEK
IENLPVAIVIDQKKVAGNSRSTVGTYTDIYTFLRLLFSRAGSPFVGYSDTFSFNHPDGKCPTCDGLGKITEINLH
QLVDYDKSLNKGPIDFPTFTVGNWRWKRYAHSGLFDLDKKIKDYSPEELALFLYAPQQKLANPPKEWPHTALYEG
IVPRMQRSILHTDEGKRHQKYLNHFVTVKRCPDCLGSRVNERVRSCKINQKSIADAVDMPLTELHSFIRSMDLSL
IKTIQEELLVRLEALINIGLSYLTLGRATETLSGGEAQRIKIAKYVNSALNDIMYILDEPSAGLHPKDIERISRA
LLNLKNKGNTVVLVEHNPQLIREADFIIDIGPFAGENGGHVQFSGTYDAFLVSKTLTSQALQEPLPLNDQPRKAR
KSLSIEHATLHNLNNLSVEVPLGVLTVICGVAGSGKSSLAEEIYQKAQADNQEIIHLSQKSITANLRSTPMTYLN
IFDKVRKLFAEENHVSPALFSYNSKGACPTCKGKGIIVSDMSFMEDVTSICETCHGTRYKEEVLHYLYNGKNIVE
VLALSVKDGYDFFKDQPFALSLKNLLEVGLSYLKLNQSLSTLSGGELQRVKLADTLHQKKAIYLMDEPTDGLHLI
DIQQSLQLFNRMVEEGNSLILLEHHIDVIKSADWLIELGPEGGKNGGQLLFTGTPANMLNSTHSITKGYL
Construct 8: EF1060-1
(SEQ ID NO 28)
DSNKAAEQKIAISSEAAISTMEPHTAGDTTSTLVMNQVYEGLYVLGKEDELELGVAAEEPAISEDETVYTFKIRE
DAKWSNDDPVTANDFVYAWQQVASPKSGSIHQALFFDVIKNAKEIALEGADVNTLGVKALDDKTLEITLERPTPY
LKSLLSFPVLFPQNEKYIKEQGDKYATDAEHLIYNGPFKLKEWDNASSDDWTYEKNDTYWDAEKVKLTEAKVSVI
KSPTTAVNLFDSNELDVVNKLSGEFIPGYVDNPAFLSIPQFVTYFLKMNSVRDGKENPALANNNIRKALAQAFDK
ESFVKEVLQDQSTATDQVIPPGQTIAPDGTDFTKLAAKKNNYLTYDTAKAKEFWEKGKKEIGLDKIKLEFLTDDT
DSAKKAAEFFQFQLEENLDGLEVNVTQVPFTIRVDRDQTRDYDLELSGWGTDYRDPLTVMRIFTSDSTLGGVTFK
SDTYDQLIQETRTTHAADQEARLNDFAQAQDILVNQETVLAPIYNRSISVLANQKIKDLYWHSFGPTYSLKWAYV
N
Construct 9: EF1093-1
(SEQ ID NO 29)
EENGESAQLVIHKKKMTDLPDPLIQNSGKEMSEFDKYQGLADVTFSIYNVTNEFYEQRAAGASVDAAKQAVQSLT
PGKPVAQGTTDANGNVTVQLPKKQNGKDAVYTIKEEPKEGVVAATNMVVAFPVYEMIKQTDGSYKYGTEELAVVH
IYPKNVVANDGSLKKVGTAENEGLNGAEFVISKSEGSPGTVKYIQGVKDGLYTWTTDKEQAKRFITGKSYEIGEN
DFTEAENGTGELTVKNLEVGSYILEEVKAPNNAELIENQTKTPFTIEANNQTPVEKTVKNDTSKVDKTTPSLDGK
DVAIGEKIKYQISVNIPLGIADKEGDANKYVKFNLVDKHDAALTFDNVTSGEYAYALYDGDTVIAPENYQVTEQA
NGFTVAVNPAYIPTLTPGGTLKFVYFMHLNEKADPTKGFKNEANVDNGHTDDQTPPTVEVVTGGKRFIKVDGDVT
ATQALAGASFVVRDQNSDTANYLKIDETTKAATWVKTKAEATTFTTTADGLVDITGLKYGTYYLEETVAPDDYVL
LTNRIEFVVNEQSYGTTENLVSPEKVPNKHKGTLPST
Construct 10: EF1277
(SEQ ID NO 30)
MNIFAVRLKEALTAKNIKPSDLAKKTGIGKSSISDWLAGRYEAKQDKVYRIADALDINEAWLMGQEVPMEKNAST
IDRIYKKLEPQRQAIVYQFAEQQLHEQQTQAEILSFPRRDEMTLAAHAGDPEKIFSKEEIEKIHDYLDEIDAKYQ
QSISSDKKED
Construct 11: EF1355
(SEQ ID NO 31)
MAYQFKLPDIGEGIAEGEIVKWFVKPGDTINEDDTLLEVQNDKSVEEIPSPVTGTVKNIVVPEGTVANVGDVLIE
IDAPGHEDNDAAPAAPAQEQTPAQPAAVPTTEAAGGFFQFKLPDIGEGIAEGEIVKWFVKAGDTINEDDSLLEVQ
NDKSVEEIPSPVTGTVKNIVVPEGTVANVGDVLVEIDAPGHNSAAPSVAAPATDAPKAEASAPAASTGVVAAADP
NKRVLAMPSVRQYAREKDVDITQVTATGKGGRVIKADIDAFVSGGSQAAPATEAAATEAAPKAEAAAPKAAPKAF
TSDLGEMETREKMTPTRKAIAKAMVNSKHTAPHVTLHDEVEVSKLWDHRKKFKDVAAANGTKLTFLPYVVKALTS
TVQKFPILNASIDDAAQEIVYKNYFNIGIATDTDHGLYVPNVKNANTKSMFAIADEINEKAALAIEGKLTAQDMR
DGTITISNIGSVGGGWFTPVINYPEVAILGVGTIAQEPVVNADGEIVVGRMMKLSLSFDHRIVDGATAQKAMNNI
KRLLADPELLLMEG
Construct 12: EF1692
(SEQ ID NO 32)
MAKRIIIMNFDIESKSYQAFSEIKKMQAERQLKGEQMAVVTHVNDGQHQFKINDFIDFTGNNHTSKDSMIGMLVG
ILGGPLGILFGWFAGSMYGASKDAKEIQEAQTVFEHVIQKIDEGQTGLLLIAEEEDNRPLNQLVMFDLGGEITRL
DLEEVQQEINDANEVANEAKQSWQAKKEQHKEATSKEE
Construct 13: EF2703-1
(SEQ ID NO 33)
GSYLKKTIDIGYVPIKNDYNEAQNKDSQSFLIMGLDNTIERKLGTTRTDAMMVITVNNKTKKITYLSLPRDSFVQ
IDAKNYQGMQRIEAAYTYDGPTASVNTVEKLLNIPINHYVVFNFLSFIKLIDAVGGIDVNVKQAFDGVTKDGPGS
IHFDAGKQHLDGTKALSYARERHSDNDIMRGFRQQEIIQAVEDKLKSGQSIMKIMDIIDSLNGNIQTDVDSNELT
HLVKEGLTWTNYDKQQLSFDWRTFSNEGRSMVELYPDSIENVRHQLRVSLNLEKPDERDQDGYVFHTNGEFLYQS
DYTVQDEAAEENEMTSINGNTYIGVPGNTQTGPLPSVKTENGFIK
Construct 14: EF3051-1
(SEQ ID NO 34)
FSSWFDDSYVKASAESSKTKEPAPVKIEKKVKPLSYGQQVNQEIEKKQYDGHLDLPLELQTDAKWKDTAYGFGNV
DKPNTIEINGCAIVSLAMVGSYMDHQEVTPLDVLAWAKNDFFMEGQGTAWSIFSAYAEMKGYNCQEIGDIETVAA
FLKEGHPVIISVKPGYFTTTGHIMVMSGVDEKGDFWINDPNDSEEKGHSKRTFTAEEVMNEALNFWAFY
Construct 15: EF3177
(SEQ ID NO 35)
MDLHLTVDLKKTKTLIDLADQAHLIIEQTTKLPKKEAAILFLLIDNQLVALGLAEEKATYKEVSFDHSILLKPTW
DTELAYLAQAFLDDAKESGLTLEATPTTVKIPKSAVATVTNYKETVTFILERFGYSLFKKPAPKKARPAKARHKW
TKEVSQIPFYIDTRQSKATVFWQKRNEMLIKAGATMMPEAPLNKDGSVGFSARFGEKLRDERKGQFKDFVTTEDI
VLKSVNEVGLFLYFAGTNSWLELVDENGKTLNEWTVVE
Construct 16: EF3183-1
(SEQ ID NO 36)
SEFNFAVTPTIPENQVDKSKTYFDLKMAPGAKQTVEIQLRNDTDEDITIENTVNSATTNLNGVVEYGQNGIKPDK
TLRFNLKDYVEAPKEIILPKHSQKTLPLTITMPKDSFDGVMAGGITLKEKKKETTTSADQSKGLAINNEYSYVVA
IILQQNETKVQPDLKLLGVKPGQVNARNVINVSLQNPQAAYLNQLHLINTVSKGGETLYQSDTEDMQVAPNSNFS
YPISLKGERLTPGKYVLKSTAYGVKDEKGTYQVKGANGEERYLYKWEFTKEFTISGDVAKELNEKDVTIKGTNWW
LYLLIALIILALLLLIFFLYRKKKKEEEQQSEQ
Construct 17: EF3207
(SEQ ID NO37)
MSKNFWATLPKPFFVLAPMEDVTDVVFRHVVKEAGAPDVLFTEFTNSDSYCHPEGKDSVRGRLVFTEDEQPMVAH
IWGDKPEFFREMSIGVAEMGFQGLDINMGCPVPNVAERGKGSGLILRPEVAAELIDAAKAGGLPVSVKTRIGFTE
MAEMEAWITHLLEQDIANLSIHLRTRKEMSKVDAHWEVIPQIMAIRDRVAPQTTITINGDIPDRQKGLELAEQYG
VDGIMIGRGIFKNPYAFEKEPKTHTPQELLGLLRLQLDLQDKYAELVPRSIVGLHRFFKIYVKGFPGASDLRAQL
MNTKSTDEVRQLLATFETEHGVLD
Construct 18: EF3256-1
(SEQ ID NO 38)
ADKKDNTTNSSSAASSETKKSTESSAPAKKVAGGDLKDGTYKLEEKNEKNGYRAVFEMTVKDGKITESKYDNINA
DGKSKTEDTKYEESMKAKSGVGPKEYIKQLNDSFVKAQSASGVEVVTGATHSSESFQNYAQQLIQAAQAGNTDTI
EIDNGATLKDGTYSLKEKNDSNGYHTTFSMTVKDGKVTESNYDNVNADGKSKKDDTEYESKMEDVAGVGPKEYIE
TLNKEFVKAMGEEDGSPAGVEVVTGATHSTHSFINYAQQLVNAAEKGDTTEIVVDNIVTK
Construct 19: EFA0042-1
(SEQ ID NO 39)
FAQEIIPDDTTTPPIEVPTEPSTPEKPTDPTPPIEPPVDPVEPPITPTEPTEPTEPTTPTEPEKPVVPTEPTTPT
EPTTPTEPSEPEQPTEPSKPVEPEKPVTPSKPAEPEKPVTPTKPTEPEKPVQPAEPSKPIDVVVTPTGELNHAGN
GTQQPTVPIETSNLAEITHVPSVTTPITTTDGENIVAVEKGVPLTQTAEGLKPIQSSYKVLPSGNVEVKGKDGKM
KVLPYT
Construct 20: EFC0034-1
(SEQ ID NO 40)
NKKTPKPLTPPKAFFNWCTAQIPTYEWQNKKETILASSRKNCPIIKKRLTKYSRLSFPTKFYSFGIILVRAKRIE
IQTHSYWQTITDGIENLIYEPSNLERFSNDTHVKAHYENGHWHEGLLANYGFMSSAYTNTVFYPNNWQEKLTTVS
ELKYLQLPEIERQELAHIYKYRNEIEFLQKIGATTLANEIIFDDYRNVFGLYFHKVDMRVITKKWLKANKQKLKT
RNPTFHEYMLEKTLKERNAPMINEIEKYVHYSQIKQLPKEVNLTKFQKWFIRKGERFDYYMDYLHMLEELNTPLN
NDSVLYPENLQVAHDNAMNTLNLLKSEIEEKQYQERKNQIKALEAEIDDLLFLTPHSLQEIIQEGSILRHCVGSQ
HYIERHTQGKTTIVFIRRKEKPDMPYFTLEYRNQQVIQIQGKCNRQEVPEKIKQAVRQWQENLQHALSS

### Example 2

### Conservation of Selected Vaccine Antigen-Encoding ORFs in E. Faecalis Clinical Isolates

### Experimental Procedures:

### Bacterial Culture and Isolation of Genomic DNA

[0146] Seven ml Luria Broth medium was inoculated with E. faecalis cells from frozen stabs, and cells were grown under aerobic conditions at 37° C., overnight. The cultures were harvested by centrifugation at 16,000×g for 15 mM and the supernatants were removed. Genomic DNA was purified using the Wizard genomic DNA purification kit (Promega) according to the manufacturer's instructions. Briefly, bacterial pellets were resuspended in 480 μl 50 mM EDTA and 120 μl lysozyme solution (10 mg/ml) (Sigma), incubated 60 min at 37° C., solutions were centrifuged at 16,000×g for 2 min, and the supernatants were removed. The cell pellets were resuspended in 600 μl Nuclei Lysis Solution (Wizard genomic DNA purification kit, Promega), incubated for 5 min at 80° C., cooled to room temperature, 3 μl RNase solution added (4 mg/ml, Promega), and incubated for 1 hr at 37° C. After cooling to 4° C. on ice, 200 μl Protein Precipitation Solution (Wizard genomic DNA purification kit, Promega) was added, the suspensions were vortexed, incubated on ice for 5 min, and centrifuged at 16,000×g for 5 min. The supernatants were transferred to new tubes containing 600 μl of room temperature isopropanol. After mixing, the solutions were centrifuged at 16,000×g for 2 m, the precipitated DNA was gently washed with 600 μl of room temperature 70% (v/v) ethanol, air-dried for 15 min at room temperature, and dissolved in 60 μl ddH₂O for 1 hr at 65° C.

### PCR:

[0147] Primers were designed for the nine ORFs; EF2703-1, EF0032-2, EF3177, EF0792-1, EF1277, EF3256-1, EF0270-2, EF1060-1, and EF3207 (Table 3) by multiple alignment of several Enterococcus spp. sequences (performed using the program VectorNTI). These nine E. faecalis ORFs were selected for PCR analysis as the recombinant protein antigens encoded by these ORFs showed the highest level of protection (≧60-100%) in the rat endocarditis model (Table 3). In order to facilitate PCR amplification, the optimal fragment size was set to 800 bp. PCR was performed in reaction volumes of 30 μl, containing 1 U Taq polymerase (Solis Biodyne, Estonia), 0.2 mM dNTPs (Invitrogen), 0.4 μM of each oligonucleotide (MWG, Germany), 2 mM MgCh and 1× buffer (Solis Biodyne, Estonia). As standard, 30 cycles (1×: 5 mM at 95° C.; 30×: 30 sec at 95° C., 30 sec at 55° C., 1 min 40 sec at 72° C.; 1×5 min at 72° C.) were performed, unless it was necessary to adapt conditions for individual primer pairs. PCR amplification was performed in a Biometra T3 Thermocycler.

[0148] In order to avoid false-negative results, all PCR reactions that were negative in the first amplification round were repeated. Optimization of PCR conditions was performed to successfully amplify the target sequence. Optimizations included increasing or lowering of the annealing temperature by 2 or 5° C., addition of betaine (final concentration 1M), or addition of DMSO (dimethylsulfoxide) to a final concentration of 2% (v/v). Touch-down-PCR conditions were used in cases where difficulties were encountered with target sequence amplification. The PCR fragments were subsequently visualized by electrophoresis on a 1% (w/v) agarose gel and staining with ethidium bromide (1:10000).

### Clinical Isolates:

[0149] Details of all isolates of E. faecalis used for PCR and sequencing are summarized in Table 4. The 46 E. faecalis isolates examined were selected to represent the serotypes that are most frequently isolated from patients. For further reference see Maekawa, S. et al., Microbiol Immunol. 1992; 36(7):671-681 or Shankar, V. et al., Infect Immun. 1999; 67(1):193-200.

### DNA Sequencing:

[0150] The oligonucleotides used for sequencing were the same as those used for PCR amplification of the nine selected E. faecalis ORFs. Sequencing was performed by Agowa Biotech AG, Berlin, Germany.

### Results

[0151] PCR was performed from genomic DNA isolated from a series of 46 independent E. faecalis clinical isolates using primers specific for the nine selected ORFs. All PCR amplicons obtained were sequenced. The results of the sequencing are presented in Table 5, where the determined DNA sequences together with the corresponding translated protein sequences are summarized.

TABLE 4
E. faecalis strains utilized for PCR and sequencing of vaccine-antigen
encoding ORFs

| | | Origin | |
|---|---|---|---|
| Strain | Species | (reference or source) | Country |
| S1 | E. faecalis | Clinical isolate | Japan |
| | | (Maekawa et al., 1992) | |
| S2 | E. faecalis | Clinical isolate | Japan |
| | | (Maekawa et al., 1992) | |
| S3 | E. faecalis | Clinical isolate | Japan |
| | | (Maekawa et al., 1992) | |
| S4 | E. faecalis | Clinical isolate | Japan |
| | | (Maekawa et al., 1992) | |
| S5 | E. faecalis | Clinical isolate | Japan |
| | | (Maekawa et al., 1992) | |
| S6 | E. faecalis | Clinical isolate | Japan |
| | | (Maekawa et al., 1992) | |
| S7 | E. faecalis | Clinical isolate | Japan |
| | | (Maekawa et al., 1992) | |
| S8 | E. faecalis | Clinical isolate | Japan |
| | | (Maekawa et al., 1992) | |
| S9 | E. faecalis | Clinical isolate | Japan |
| | | (Maekawa et al., 1992) | |
| S10 | E. faecalis | Clinical isolate | Japan |
| | | (Maekawa et al., 1992) | |
| S11 | E. faecalis | Clinical isolate | Japan |
| | | (Maekawa et al., 1992) | |
| S12 | E. faecalis | Clinical isolate | Japan |
| | | (Maekawa et al., 1992) | |
| S13 | E. faecalis | Clinical isolate | Japan |
| | | (Maekawa et al., 1992) | |
| S14 | E. faecalis | Clinical isolate | Japan |
| | | (Maekawa et al., 1992) | |
| S15 | E. faecalis | Clinical isolate | Japan |
| | | (Maekawa et al., 1992) | |
| S16 | E. faecalis | Clinical isolate | Japan |
| | | (Maekawa et al., 1992) | |
| S17 | E. faecalis | Clinical isolate | Japan |
| | | (Maekawa et al., 1992) | |
| S18 | E. faecalis | Clinical isolate | Japan |
| | | (Maekawa et al., 1992) | |
| S19 | E. faecalis | Clinical isolate | Japan |
| | | (Maekawa et al., 1992) | |
| S20 | E. faecalis | Clinical isolate | Japan |
| | | (Maekawa et al., 1992) | |
| S21 | E. faecalis | Clinical isolate | Japan |
| | | (Maekawa et al., 1992) | |
| 12030 (S22) | E. faecalis | Clinical isolate | Germany |
| 12107 (S23) | E. faecalis | Clinical isolate | Germany |
| OG1RF (S24) | E. faecalis | Laboratory strain | Germany |
| S25 | E. faecalis | Clinical isolate | Germany |
| S26 | E. faecalis | Clinical isolate | USA |
| | | (Shankar et al., 1999) | |
| HSM3143a | E. faecalis | Clinical isolate | Portugal |
| HSM3686 | E. faecalis | Clinical isolate | Portugal |
| HSM3720 | E. faecalis | Clinical isolate | Portugal |
| HSM3840 | E. faecalis | Clinical isolate | Portugal |
| HSM4182 | E. faecalis | Clinical isolate | Portugal |
| U-1482 | E. faecalis | Clinical isolate | Portugal |
| U-1740 | E. faecalis | Clinical isolate | Portugal |
| U-1780 | E. faecalis | Clinical isolate | Portugal |
| U-1881 | E. faecalis | Clinical isolate | Portugal |
| U-2265 | E. faecalis | Clinical isolate | Portugal |
| 32 | Enterococcus sp. | Skin soft tissue infection | Germany |
| 88 | Enterococcus sp. | Skin soft tissue infection | Germany |
| 99 | Enterococcus sp. | Skin soft tissue infection | Germany |
| 44 | Enterococcus sp. | Skin soft tissue infection | Germany |
| 4 | Enterococcus sp. | Urinary tract infection | Germany |
| 100 | Enterococcus sp. | Urinary tract infection | Germany |
| 2 | Enterococcus sp. | Urinary tract infection | Germany |
| 31 | Enterococcus sp. | Intra-abdominal infection | Germany |
| 75 | Enterococcus sp. | Intra-abdominal infection | Germany |
| 64 | Enterococcus sp. | Intra-abdominal infection | Germany |

TABLE 5
Summary on the sequence conservation of the selected 9 E. faecalis genes in
forty-six isolates. In case a particular sequence (or fragment) has been determined, then
the respective SEQ ID NOs are shown, first the encoding DNA, then the translated
polypeptide sequence as second.

| Strain | EF0032 | EF0270 | EF0792 | EF1060 | EF1277 | EF2703 | EF3177 | EF3207 | EF3256 |
|---|---|---|---|---|---|---|---|---|---|
| S1 | 85/86 | 179/ | 271/ | 355/ | 441/ | 513/ | 605/ | n.d. | 713/ |
| | | 180 | 272 | 356 | 442 | 514 | 606 | | 714 |
| S2 | 87/88 | 181/ | 273/ | 357/ | n.d. | 515/ | 607/ | n.d. | 715/ |
| | | 182 | 274 | 358 | | 516 | 608 | | 716 |
| S3 | 89/90 | 183/ | 275/ | 359/ | n.d. | 517/ | 609/ | n.d. | 717/ |
| | | 184 | 276 | 360 | | 518 | 610 | | 718 |
| S4 | 91/92 | 185/ | 277/ | 361/ | 443/ | 519/ | 611/ | 691/ | 719/ |
| | | 186 | 278 | 362 | 444 | 520 | 612 | 692 | 720 |
| S5 | 93/94 | 187/ | 279/ | 363/ | 445/ | 521/ | 613/ | n.d. | 721/ |
| | | 188 | 280 | 364 | 446 | 522 | 614 | | 722 |
| S6 | 95/96 | 189/ | 281/ | 365/ | n.d. | 523/ | 615/ | n.d. | 723/ |
| | | 190 | 282 | 366 | | 524 | 616 | | 724 |
| S7 | 97/98 | 191/ | 283/ | 367/ | 447/ | 525/ | 617/ | n.d. | 725/ |
| | | 192 | 284 | 368 | 448 | 526 | 618 | | 726 |
| S8 | 99/100 | 193/ | 285/ | 369/ | 449/ | 527/ | 619/ | n.d. | 727/ |
| | | 194 | 286 | 370 | 450 | 528 | 620 | | 728 |
| S9 | 101/ | 195/ | 287/ | 371/ | n.d. | 529/ | 621/ | n.d. | 729/ |
| | 102 | 196 | 288 | 372 | | 530 | 622 | | 730 |
| S10 | 103/ | 197/ | 289/ | 373/ | n.d. | 531/ | 623/ | n.d. | 731/ |
| | 104 | 198 | 290 | 374 | | 532 | 624 | | 732 |
| S11 | 105/ | 199/ | n.d. | 375/ | 451/ | 533/ | 625/ | n.d. | 733/ |
| | 106 | 200 | | 376 | 452 | 534 | 626 | | 734 |
| S12 | 107/ | 201/ | 291/ | 377/ | 453/ | 535/ | n.d. | n.d. | 735/ |
| | 108 | 202 | 292 | 378 | 454 | 536 | | | 736 |
| S13 | 109/ | 203/ | 293/ | 379/ | n.d. | 537/ | 627/ | n.d. | 737/ |
| | 110 | 204 | 294 | 380 | | 538 | 628 | | 738 |
| S14 | 111/ | 205/ | 295/ | 381/ | 455/ | 539/ | 629/ | n.d. | 739/ |
| | 112 | 206 | 296 | 382 | 456 | 540 | 630 | | 740 |
| S15 | 113/ | 207/ | 297/ | 383/ | 457/ | 541/ | 631/ | n.d. | 741/ |
| | 114 | 208 | 298 | 384 | 458 | 542 | 632 | | 742 |
| S16 | 115/ | 209/ | 299/ | 385/ | 459/ | 543/ | 633/ | n.d. | 743/ |
| | 116 | 210 | 300 | 386 | 460 | 544 | 634 | | 744 |
| S17 | 117/ | 211/ | n.d. | n.d. | 461/ | 545/ | 635/ | n.d. | 745/ |
| | 118 | 212 | | | 462 | 546 | 636 | | 746 |
| S18 | 119/ | 213/ | 301/ | 387/ | 463/ | 547/ | 637/ | n.d. | 747/ |
| | 120 | 214 | 302 | 388 | 464 | 548 | 638 | | 748 |
| S19 | 121/ | 215/ | 303/ | 389/ | 465/ | 549/ | 639/ | n.d. | 749/ |
| | 122 | 216 | 304 | 390 | 466 | 550 | 640 | | 750 |
| S20 | 123/ | 217/ | 305/ | 391/ | 467/ | 551/ | 641/ | n.d. | 751/ |
| | 124 | 218 | 306 | 392 | 468 | 552 | 642 | | 752 |
| S21 | 125/ | 219/ | 307/ | 393/ | n.d. | 553/ | 643/ | n.d. | n.d. |
| | 126 | 220 | 308 | 394 | | 554 | 644 | | |
| 12030 | 127/ | 221/ | 309/ | 395/ | 469/ | 555/ | 645/ | n.d. | 753/ |
| (S22) | 128 | 222 | 310 | 396 | 470 | 556 | 646 | | 754 |
| 12107 | 129/ | 223/ | 311/ | 397/ | 471/ | 557/ | 647/ | n.d. | 755/ |
| (S23) | 130 | 224 | 312 | 398 | 472 | 558 | 648 | | 756 |
| OG1RF | 131/ | 225/ | 313/ | 399/ | 473/ | 559/ | 649/ | n.d. | 757/ |
| (S24) | 132 | 226 | 314 | 400 | 474 | 560 | 650 | | 758 |
| S25 | 133/ | 227/ | 315/ | 401/ | 475/ | 561/ | 651/ | n.d. | 759/ |
| | 134 | 228 | 316 | 402 | 476 | 562 | 652 | | 760 |
| S26 | 135/ | 229/ | n.d. | 403/ | 477/ | 563/ | 653/ | 693/ | 761/ |
| | 136 | 230 | | 404 | 478 | 564 | 654 | 694 | 762 |
| HSM3143a | 137/ | 231/ | 317/ | 405/ | 479/ | 565/ | 655/ | n.d. | 763/ |
| | 138 | 232 | 318 | 406 | 480 | 566 | 656 | | 764 |
| HSM3686 | 139/ | 233/ | 319/ | 407/ | 481/ | 567/ | 657/ | n.d. | 765/ |
| | 140 | 234 | 320 | 408 | 482 | 568 | 658 | | 766 |
| HSM3720 | 141/ | 235/ | 321/ | 409/ | n.d. | 569/ | 659/ | 695/ | 767/ |
| | 142 | 236 | 322 | 410 | | 570 | 660 | 696 | 768 |
| HSM3840 | 143, 145/ | 237/ | 323/ | 411/ | 483/ | 571/ | 661/ | 697/ | 769/ |
| | 144, 146 | 238 | 324 | 412 | 484 | 572 | 662 | 698 | 770 |
| HSM4182 | 147/ | 239/ | 325/ | 413/ | n.d. | 573/ | 663/ | 699/ | 771/ |
| | 148 | 240 | 326 | 414 | | 574 | 664 | 700 | 772 |
| U-1482 | 149/ | 241/ | 327/ | 415/ | 485/ | 575/ | n.d. | n.d. | 773/ |
| | 150 | 242 | 328 | 416 | 486 | 576 | | | 774 |
| U-1740 | 151/ | 243/ | 329/ | 417/ | 487/ | 577/ | 665/ | n.d. | 775/ |
| | 152 | 244 | 330 | 418 | 488 | 578 | 666 | | 776 |
| U-1780 | 153/ | 245/ | n.d. | 419/ | 489/ | 579/ | 667/ | n.d. | n.d. |
| | 154 | 246 | | 420 | 490 | 580 | 668 | | |
| U-1881 | 155/ | 247/ | 331/ | 421/ | n.d. | 581/ | 669/ | n.d. | 777/ |
| | 156 | 248 | 332 | 422 | | 582 | 670 | | 778 |
| U-2265 | 157/ | 249/ | 333/ | n.d. | 491/ | 583/ | 671/ | n.d. | 779/ |
| | 158 | 250 | 334 | | 492 | 584 | 672 | | 780 |
| 32 | 159/ | 251/ | 335/ | n.d. | 493/ | 585/ | 673/ | 701/ | 781/ |
| | 160 | 252 | 336 | | 494 | 586 | 674 | 702 | 782 |
| 88 | 161/ | 253/ | 337/ | 423/ | 495/ | 587/ | n.d. | n.d. | 783/ |
| | 162 | 254 | 338 | 424 | 496 | 588 | | | 784 |
| 99 | 163/ | 255/ | 339/ | 425/ | 497/ | 589/ | 675/ | n.d. | 785/ |
| | 164 | 256 | 340 | 426 | 498 | 590 | 676 | | 786 |
| 44 | 165/ | 257/ | 341/ | 427/ | 499/ | 591/ | 677/ | 703/ | 787/ |
| | 166 | 258 | 342 | 428 | 500 | 592 | 678 | 704 | 788 |
| 4 | 167/ | 259/ | 343/ | 429/ | 501/ | 593/ | 679/ | n.d. | 789/ |
| | 168 | 260 | 344 | 430 | 502 | 594 | 680 | | 790 |
| 100 | 169/ | 261/ | 345/ | 431/ | 503/ | 595/ | 681/ | n.d. | n.d. |
| | 170 | 262 | 346 | 432 | 504 | 596 | 682 | | |
| 2 | 171/ | 263/ | 347/ | 433/ | 505/ | 597/ | 683/ | 705/ | 791/ |
| | 172 | 264 | 348 | 434 | 506 | 598 | 684 | 706 | 792 |
| 31 | 173/ | 265/ | 349/ | 435/ | 507/ | 599/ | 685/ | 707/ | 793/ |
| | 174 | 266 | 350 | 436 | 508 | 600 | 686 | 708 | 794 |
| 75 | 175/ | 267/ | 351/ | 437/ | 509/ | 601/ | 687/ | 709/ | 795/ |
| | 176 | 268 | 352 | 438 | 510 | 602 | 688 | 710 | 796 |
| 64 | 177/ | 269/ | 353/ | 439/ | 511/ | 603/ | 689/ | 711/ | 797/ |
| | 178 | 270 | 354 | 440 | 512 | 604 | 690 | 712 | 798 |

“n.d.” means “not determined”.

1. A protective peptide consisting of an antigen of E. faecalis of the SEQ ID NO: 21, SEQ ID NO: 22, SEQ ID NO: 23, SEQ ID NO: 24, SEQ ID NO: 25, SEQ ID NO: 26, SEQ ID NO: 27, SEQ ID NO: 28, SEQ ID NO: 29, SEQ ID NO: 30, SEQ ID NO: 31, SEQ ID NO: 32, SEQ ID NO: 33, SEQ ID NO: 34, SEQ ID NO: 35, SEQ ID NO: 36, SEQ ID NO: 37, SEQ ID NO: 38, SEQ ID NO: 39, SEQ ID NO: 40 or a functional active variant of the antigen of any of the SEQ ID NOs: 21 to 40.

2. A protective peptide consisting of an antigen of E. faecalis of the SEQ ID NO: 21, SEQ ID NO: 22, SEQ ID NO: 24 or SEQ ID NO: 25 or a functional active variant of an antigen of E. faecalis of the SEQ ID NO: 21, SEQ ID NO: 22, SEQ ID NO: 24 or SEQ ID NO: 25, and
a) 1 to 450 additional amino acid residue(s), preferably 1 to 400, 1 to 350, 1 to 300, 1 to 250, 1 to 200, 1 to 150, more preferably 1 to 100, even more preferably at most 1 to 50, most preferably 1, 2, 3, 4, 5, 10, 20, 30 or 40 additional amino acids residue(s) if the antigen is SEQ ID NO: 21, wherein the additional amino acid residue(s) is/are flanking the antigen C-terminally, N-terminally or C- and N-terminally; or
b) 1 to 400 additional amino acid residue(s), preferably 1 to 350, 1 to 300, 1 to 250, 1 to 200, 1 to 150, more preferably 1 to 100, even more preferably at most 1 to 50, most preferably 1, 2, 3, 4, 5, 10, 20, 30 or 40 additional amino acids residue(s) if the antigen is SEQ ID NO: 22, wherein the additional amino acid residue(s) is/are flanking the antigen C-terminally, N-terminally or C- and N-terminally; or
c) 1 to 300 additional amino acid residue(s), preferably 1 to 250, 1 to 200, 1 to 150, more preferably 1 to 100, even more preferably at most 1 to 50, most preferably 1, 2, 3, 4, 5, 10, 20, 30 or 40 additional amino acids residue(s) if the antigen is SEQ ID NO: 24, wherein the additional amino acid residue(s) is/are flanking the antigen C-terminally, N-terminally or C- and N-terminally; or
d) 1 to 125 additional amino acid residue(s), preferably 1 to 100, 1 to 80, 1 to 60, more preferably 1 to 40, even more preferably at most 1 to 30, most preferably 1, 2, 3, 4, 5, 10, 15, 20, or 25 additional amino acids residue(s) if the antigen is SEQ ID NO: 25, wherein the additional amino acid residue(s) is/are flanking the antigen C-terminally, N-terminally or C- and N-terminally.

3. The protective peptide of claim 1 further consisting of at least one amino acid residue heterologous to the antigen, preferably an additional amino acid sequence comprising a marker protein.

4. A protective peptide, characterized in that comprises at least 2, preferably at least 3, more preferably at least 4 antigens as defined in claim 1.

5. The protective peptide of claim 2 wherein the additional amino acid residue(s) consist of at least one amino acid residue heterologous to the antigen, preferably an additional amino acid sequence comprising a marker protein.

6. The protective peptide of claim 1 wherein the functional active variant is essentially identical to any of the antigens of the SEQ ID NOs: 21 to 40, but differs from the antigens of any of the SEQ ID NOs: 21 to 40 in that it is derived from a homologous sequence of a different serotype of E. faecalis.

7. The protective peptide of claim 1, wherein the functional active variant is a portion of any of the SEQ ID NOs: 21 to 40 consisting of at least 60%, preferably at least 70%, more preferably at least 80%, still more preferably at least 90%, even more preferably at least 95%, most preferably 99% of the amino acids of the antigen of any of the SEQ ID NOs: 21 to 40.

8. The protective peptide of claim 1, wherein the functional active variant of the antigen of any of the SEQ ID NOs: 21 to 40 has at least 50% sequence identity to the antigen of any of the SEQ ID NOs: 21 to 40, especially at least 60%, preferably at least 70%, more preferably at least 80%, still more preferably at least 90%, even more preferably at least 95%, most preferably 99% sequence identity to the antigen of any of the SEQ ID NOs: 21 to 40.

9. The protective peptide of claim 8, wherein the variant is derived from the antigen of any of the SEQ ID NOs: 21 to 40 by at least one conservative amino acid substitution.

10. A nucleic acid coding for the protective peptide according to claim 1 or a nucleic acid complementary thereto, particularly a DNA sequence of any of the sequences of SEQ ID NOs: 1 to 20 or the corresponding RNA sequence.

11. The nucleic acid of claim 10, wherein the nucleic acid is located in a vector.

12. A pharmaceutical composition comprising
(i) at least one protective peptide according to claim 1 and
(ii) optionally a pharmaceutically acceptable carrier or excipient.

13. A pharmaceutical composition containing
(i) a nucleic acid according to claim 10 and/or a nucleic acid complementary thereto and
(ii) optionally a pharmaceutically acceptable carrier or excipient.

14. The pharmaceutical composition of claim 13, wherein the nucleic acid is comprised in a vector and/or a cell.

15. An antibody or functional active fragment thereof which binds specifically to the protective peptide according to claim 1.

16. The antibody or functional active fragment thereof of claim 15, wherein the antibody is a monoclonal, polyclonal, chimeric or humanized antibody, or wherein the functional active fragment comprises a Fab fragment.

17. A hybridoma cell line which produces the antibody according to claim 15.

18. A method for producing an antibody comprising:
(a) administering an effective amount of the peptide according to claim 1 to an animal; and
(b) isolating the antibody produced by the animal in response to the administration of step (a) from the animal.

19. A method for producing an antibody comprising:
(a) contacting a B cell with an effective amount of the peptide according to claim 1;
(b) fusing the B cell of step (a) with a myeloma cell to obtain a hybridoma cell; and
(c) isolating the antibody produced by the cultivated hybridoma cell.

20. The method of claim 18, wherein the isolated antibody is additionally purified.

21. A pharmaceutical composition comprising the antibody according to claim 15.

22. A pharmaceutical composition as defined in claim 12 for the immunization of a subject against an infection or the treatment of a subject having an infection.

23. A method for immunization against or treatment of an infection, comprising administering an effective amount of a peptide according to claim 1 to a subject in need thereof.

24. A method for immunization against or treatment of an infection comprising administering an effective amount of an antibody or functional fragment thereof according to claim 15 to a subject in need thereof.

25. A method of diagnosing an E. faecalis infection comprising the steps of:
(a) contacting a sample obtained from a subject with the peptide according to claim 1; and
(b) detecting the presence of an antibody against E. faecalis in the sample.

26. A method of diagnosing an E. faecalis infection comprising the steps of:
(a) contacting a sample obtained from a subject with the antibody according to claim 15; and
(b) detecting the presence of an antigen of E. faecalis in the sample.

27. A method for isolation and/or purification and/or identification of an interaction partner comprising contacting a peptide according to claim 1 with a sample and isolating and/or purifying and/or identifying an interaction partner of the peptide.

The application's sequence listing, which the Patent Office published only in electronic form, follows.

SEQUENCE LISTING (798 sequences)

SEQ ID NO: 1 - DNA, 1233 bp, Artificial Sequence
  Construct 1: EF0032-2 nt
atggtcactggtattttagatgattggaactacgcatcacgcagcttgtattctgagccttatcctgacttaaaaaatctagtcgatcaaacaaaaaaagaaaatgataccttttaccgcttggaaaatttaaatggtgtttcggccaatgacggcattaactatggctacagtggcattagcatgttttcttccgtacggaaccgacattcttcaacatacctaaacgccttaggtttccgctcacgaggcacgaatttaaatattcgttaccaaaataataccttgttaatggatgctttgatgggcattaaatacaatattgctgaaaacaatccaatgaaattcggctttgagcgacaagctgctgctggtaaatatcagctttatcgtaacgaaaatgctttgccgttaggatttttagcagacaaagagatttacaatgtccggcaacctctcaatgataatttaggtagtcaaacaaatttactaaatgctttagccaatactaatgaacggtattttaccttttatcaaccaacgatgacgcttcaaaataacgtgacaattacgcaaaatacagctggcgtaacttttacggagaaacaacataacgtagccaaagagatttcttatacagtcaatgtgcccgccaatacgcaagcttatttgagtttattcccaacggattttgctcaattggaaagttccactgcgacggtcaccgtgaacggctcaagtcagcaatcacaaattggcattactggccaatattataacttaggttactatcccaaagatacaaccgttaacttcaaagtaagtttttatggaaccaaagcagtaagttttgttcagccgcaagtggttggcttaaataccaatgcatttgaaaaagccatttccgccgtgcaagaaaaaggcgttgatttaacaactggcaaacgctctgcttcaggtacctttaccgccgacaaagatcaagtactcgtcactacaattccttatgacaaaggttggcgtgtcaaaattgatggcaaaaaagttaccccaaaagcctttaaagatgcctttctaagcgttcctgtcagcgctggaacccatactattcagttctcttatttaccagaaggattgattcctggcatcgtgttattcgttctatgtactggtggtttcgttgcctacgtaaccttgattcctgctagacgaaaccgtaaaaaagaagacaaa

SEQ ID NO: 2 - DNA, 549 bp, Artificial Sequence
  Construct 2: EF0270-2 nt
gccattgcagcggtcgttggttttggtctaacattcttcttctggaaagacaatacagttgaggaagaagaagtgattattgataaaacaacgattaaaaaagaaaatattacaagtccagtcaaaggacgagtgttatctttaaaaaatgcagaggatcctgcttttgcaaatggagcattaggaaatggggtcgtgattgaaccaacggaaggtaaagtggttgcaccctttgatggaacgattgtcacactattcccaacaaaacatgcattaggtttgatttcagataacggcacagaattattgattcatattgggattgatacagttcaattagaaggcgaaggctttgaagcttttgtaaaacaaggtgaccgcgtgaaaaaaggtcaaacattagtaacctttgatttagaaggaattaaaaaagctgggtttagtacacaaattccaatcgttgtgacgaatacagcggattatttagatattttggaagtcggcagtaatgaagtttcaacaagtgatgatttgctgaccgctttaata

SEQ ID NO: 3 - DNA, 1110 bp, Artificial Sequence
  Construct 3: EF0428 nt
ttgccgatgattattaaacaggaacaattcataccaaaagatacagtagaaacaacgattgacttattaattagaaatttaacaacgattaaagataacacaggtgaatttctgttagattttgatggtttaaaagttgatgacaaaagttggacgatttggaactggccgcaaggcgttgggttgtatggtatatataagaattatcgaaatactaaaagtgaaaaagctttacaagtagttaacgactggtttgaaggtcggatgcaagaaggcgcgccgcctaagaatgtgaatacgatggctccgcttttaacaatggcttatctatatgaagacactaaagactctaaatatataccttacttagagcaatgggcggaatgggtgatggaagaaatgccccgaacgaatgaaggtggcttgcaacatgcgacatatggaccagaaaataaaaatcaattatgggatgatacgttaatgatgactgtcttacctttggcaaaaattggtaagttgttgaatcgactcgattatttggaagaagcaaagcatcaatttttaatccatattaaatatttacaagataaaaaaagtggtctatggtatcacggttggacttttgagggaaatcataactatgcggaagcactgtgggcaagaggaaactgctggattacgattgctattccagaaattattgaaatcttagagttgccaaaaggagatagtttacgggaatttttattgagtaccctcaatgcgcaagtggcagctttagcgaaataccaagatgaatctggtttatggcatacattaattaatgattcaaattcgtatttagaatcttctgctacagcgggattcgcttatgggattttaaaagcggttcataaaaaatatatttcttctgaatatgaagaagtggcaaacaaagcaattgctggcttactaaatgagattgatgaaacgggagaagtacaacatgtgtcagttggtacaggaatgggtgataatttagatttttatcgcacaattggaatgacagcgatgccttatggtcaatcattaacaatcctatgtttgactgaattgcttgtttcttattgc

SEQ ID NO: 4 - DNA, 816 bp, Artificial Sequence
  Construct 4: EF0779-2 nt
ggctatataattttcaacgctgtttacttaacagggctattagaatcaaaacctttgattatttcgcatcgaggggtcaccaatagtaatggcgtacaaaataccattcctgctatggaaagaaccattaaatttaaaccagattatattgaaattgatgttcaagaaaccaaagaccatcaatttgttgtgatgcatgatgcaaaccttcaagaactcgccggcgttgatggcacgccgcaagaatttacgttggctgaattaacaaaaatgaccgttaaagaaaatggccaagaagcaccaattgccagttttgatgattatttagcgaaagcaaaccaagccaaacaaaaattactagtagaaattaaaacgtctaaacaagatagtcaaggtgcgctttctaactttattgaaaaatatgaacgtcctctgataaagaataaccatcaggttcaatctctcgactacaatgtgatcaaagcgtttaaaaaagccaaatcaaaagtaaaagttagttttattttgccctataatttcacttttccagaaacacaagctgatttgtatacaatggaagctactacgttgaatgataccttcattttaaaagctgaccaacagaaaaaagcagtttatgcttggacagttaatgactcagaggtattgagtaaaatgctctttatggacgttgctggagtgattaccgatgatttggagttagtcaatgaagaagtcaatgactttgaaaaaaatccgtcgtatgcggatcgtattttgcattatatttttatgctaccaagtgtggcttctcaa

SEQ ID NO: 5 - DNA, 543 bp, Artificial Sequence
  Construct 5: EF0792-1 nt
ttagctcaaggaaatcgtttagccgtagatcaatggcaagcgaatcaagtggttttatcaaaagaggccaatagtaatttaaatgtatcagtgttagatgaaaacgtgaaagaaacgatttcaggaggcaaaattgcaccgattggtcaacaatctttagccatccgcccagcagatgataaaaaggctgaattaacgaatgttagcttatttgggattgaaaaagaaagttttttaatgccaaaagtgattgaaggaaacgcatttactgataaaaatcaagtgattgcttcagaaacattgaaaaatcaaggatttaaaattggcgacaaattaactgcagggaaatatgatgagcaattagaaattgtcggctttatttctaaaagtagctataacattgtgccagttatttacacttctctggatacttggcggtcaattaaatatggtgacaatccagcaatggccaaaatggttaatggtttcattgttcgcagcaaggacaacacggaagttaaaacgactaataaagacagccaa

SEQ ID NO: 6 - DNA, 810 bp, Artificial Sequence
  Construct 6: EF1026 nt
atgaaaaaagagatcattgtttatactatttccgattcacttggagaaacatcacaaaaattgttagctgcagcaagcgcacaatatccagatatttcttttcttaatcgatacaatttttcttttgtcacaacagaagaagaattattagagattttaaaagatgccttaaaagataaagccttagttgtcagtacattagtcagtaaacaactaatcacagcggcgaaagaatttagtgaacgaacagggttgttatatttagatttaatggcgccattttttgaattaattcaagcgaaagccggagtagatcctattgaagagcctggacgacgccaccaactagatcgtgcctattttgataaaatctcagcgattgaatttgctgtaaaatatgatgatggcaaaaatcctcaagggtttcttgattctgatatattgttgttaggcgtttcgcggacctcaaagacgccagtcagtatgtatttagcgaatcaaggctaccgcgtttctaacttaccattaattccagaagttccattgccgccaattttggaagaaatggatccacaaaaaatgattggtttagtttgttcgccagaaacattaggacagattcgtagcagtcggttggcttccttaggtttaggtaatgagaccagttataccaatgttgaacggattgaacaagaattagcttatgccgaagagatttttgcgaagtatggcatcccagtgattgatgtaaccgcaaaatctgtcgaagaaacagcctttttaattaaagaaaaactagatgaaagaaat

SEQ ID NO: 7 - DNA, 2235 bp, Artificial Sequence
  Construct 7: EF1032 IB nt
atggaatggattgaaattaagcacgcaacacaaaataatttgaagaatatctctgtcaatatccctaaaaagcaactaactgttgttactggactttcgggttcaggaaagtcctccttagtatttgacacattagccgctgaatcacgtcgtgaactaaatgatacatttagttcgtttgttcaaaattacttacccaaatatggtcgtccagaagttgaaaaaatcgagaatcttcctgttgcaattgtcattgaccagaaaaaagtagcaggtaattctcgttcgacagtgggaacgtacacagatatttatacgtttttacgtttgctgttttcacgagcaggttctccatttgttggttattcagatactttttcgtttaatcatccggatggaaaatgtccaacatgcgatggcttaggaaagattaccgaaatcaatcttcatcagctagttgattatgacaaatcattaaacaaagggcctatcgatttccccacatttacagttggcaactggcggtggaagcgttatgcccatagtggtctatttgatttggataaaaaaatcaaggactattctcctgaagagttagcattatttttatatgctccacaacaaaaactagctaatccacccaaagagtggcctcatacagctttgtatgaaggaatcgtcccgcgtatgcaacgtagcatattgcatacagacgaaggcaaacgtcatcaaaaataccttaatcactttgttaccgtaaaaagatgtcctgattgtttaggaagtagagtcaatgaacgtgttcgtagctgcaaaattaatcagaaaagtattgctgatgctgttgacatgccactcactgaattacattcttttattcgttcaatggacctatccttaataaaaactattcaagaagagctacttgtacgtctagaagcattaattaatatcggtctctcctacctcacattaggacgagcaactgaaacactttctggtggtgaagcacagcggattaaaattgctaagtatgtaaacagcgccttaaatgatattatgtatattttagatgaaccaagtgctggcttacatccaaaggacatcgaacggatcagtcgtgcattgctcaatttaaaaaataaaggaaacaccgtggttctcgtggaacataatccacaattaattagagaagctgattttatcatcgatatcggacctttcgcaggcgaaaatggtggccatgtccagttttcaggaacgtatgacgcatttttagtctccaaaaccttgactagtcaagcgcttcaagagccgctccctttaaacgaccaaccaagaaaagcaaggaagtctttatcaatcgaacatgcgacactgcataatttaaacaatctatctgtcgaagttccgttaggagttttgactgttatttgtggggtcgctggttcaggtaaatcatcattagcggaagaaatttatcaaaaagcccaggctgataaccaagaaattattcatctttcacaaaaaagcattaccgcaaatttacgatccacacctatgacctatcttaatatttttgataaggtccgcaaactgtttgcggaagaaaatcatgttagtccagctttatttagctataattccaaaggcgcctgtcctacttgcaaggggaaaggcataattgtctccgatatgtcttttatggaggatgttactagtatttgcgaaacctgtcacggaacgcgttacaaagaagaggtgcttcattatctgtataacggaaaaaatatcgttgaagtactagctttaagcgttaaagatggctatgattttttcaaagaccagccttttgctctttcattaaaaaatttactggaagttggcttaagctatcttaaactcaatcaatcgctctcaacattatctggtggcgaattgcaaagggtaaaattagcagacacacttcaccaaaaaaaagctatctatttaatggatgaacctacagatggtttacacttaattgatatccaacaaagtcttcaacttttcaatcgaatggtagaagaaggaaacagcttgattttattagaacatcacattgatgtgattaaaagtgccgactggttgattgaactaggtcccgaaggtggaaaaaatggcggacagcttctttttacaggaaccccagcaaatatgctaaattccactcattctattactaaaggctatctg

SEQ ID NO: 8 - DNA, 1578 bp, Artificial Sequence
  Construct 8: EF1060-1 nt
gatagtaacaaagcagcggaacaaaaaattgcaattagttctgaagcggctatttcgacaatggaaccacacacagcgggggatacgacctcgactttagtcatgaatcaagtttatgaaggactctatgttttaggtaaagaagatgaattagagttgggggtcgctgccgaagaaccagcgatttctgaagatgaaaccgtttatacatttaagattagagaagatgccaaatggtcgaatgatgatccagtaacagcaaacgactttgtttatgcatggcaacaagttgcttcccctaaatcaggatcgattcatcaagctttattttttgatgtcattaaaaatgctaaggaaattgctttagaaggcgcagatgtgaatactcttggggttaaggcgctagatgataaaacgttagaaataactttagaacggcccaccccttatttgaaatcattactttcgtttcctgttttgtttccacaaaatgaaaaatatatcaaagaacaaggggataaatatgctactgatgcagaacatttgatttataatggtccttttaaattgaaagaatgggataatgcctcttctgatgactggacctacgaaaaaaatgatacgtattgggatgctgaaaaagttaaattaacagaagcgaaagtttcagtaattaagagcccaacgacagcggtgaatttgtttgactcgaatgaattggatgtagtgaataagctaagtggtgaatttattcctggttatgttgataatccagcctttctttcaattcctcaattcgtcacatactttttaaaaatgaacagcgttcgtgatggaaaagaaaatccggctttagcgaacaacaatattcgtaaagcgttggcacaagcttttgataaagaaagttttgtaaaagaagtcttgcaagatcaatcaacggctacagatcaagtaattccgccgggacaaacgattgcgccagatggaacagatttcacaaaactagctgctaagaaaaataactacttaacctacgatacagcgaaagcaaaagaattctgggaaaaagggaaaaaagaaattgggctggataaaatcaaattagaatttttaacagatgatacagacagcgccaaaaaagctgctgagtttttccaatttcaattggaagaaaatctagatggattagaagtgaatgttactcaagttccttttactattcgtgttgatcgtgatcaaacgagagactatgatttagaattatctggttggggaaccgattatcgtgatccattaacagttatgcgcatctttacttcggatagtaccttgggcggcgtaacgttcaagagtgatacgtatgatcaattaattcaagaaactagaacaacacatgcggctgatcaagaggctcgtttaaatgactttgctcaagcacaagatattttggtgaatcaggaaacggttttagcaccaatctacaatcgaagcatttctgtattagctaatcaaaaaatcaaggatctgtattggcattcatttggacccacgtacagtttaaaatgggcttatgttaac

SEQ ID NO: 9 - DNA, 1686 bp, Artificial Sequence
  Construct 9: EF1093-1 nt
gaagaaaatggggagagcgcacagctcgtgattcacaaaaagaaaatgacggatttaccagatccgcttattcaaaatagcgggaaagaaatgagcgagtttgataaatatcaaggactggcagatgtgacgtttagtatttataacgtgacgaacgaattttacgagcaacgagcggcaggcgcaagcgttgatgcagctaaacaagctgtccaaagtttaactcctgggaaacctgttgctcaaggaaccaccgatgcaaatgggaatgtcactgttcagttacctaaaaaacaaaatggtaaagatgcagtgtataccattaaagaagaaccaaaagagggtgtagttgctgctacgaatatggtggtggcgttcccagtttacgaaatgatcaagcaaacagatggttcctataaatatggaacagaagaattagcggttgttcatatttatcctaaaaatgtggtagccaatgatggtagtttgaaaaaagtaggaactgctgaaaatgaaggattaaatggcgcagaatttgttatttctaaaagcgaaggctcaccaggcacagtaaaatatatccaaggagtcaaagatggattatatacatggacaacggataaagaacaagcaaaacgctttattactgggaaaagttatgaaattggcgaaaatgatttcacagaagcagagaatggaacgggagaattaacagttaaaaatcttgaggttggttcgtatattttagaagaagtaaaagctccaaataatgcagaattaattgaaaatcaaacaaaaacaccatttacaattgaagcaaacaatcaaacacctgttgaaaaaacagtcaaaaatgatacctctaaagttgataaaacaacaccaagcttagatggtaaagatgtggcaattggcgaaaaaattaaatatcaaatttctgtaaatattccattggggattgcagacaaagaaggcgacgctaataaatacgtcaaattcaatttagttgataaacatgatgcagccttaacttttgataacgtgacttctggagagtatgcttatgcgttatatgatggggatacagtgattgctcctgaaaattatcaagtgactgaacaagcaaatggcttcactgtcgccgttaatccagcgtatattcctacgctaacaccaggcggcacactaaaattcgtttactttatgcatttaaatgaaaaagcagatcctacgaaaggctttaaaaatgaggcgaatgttgataacggtcataccgacgaccaaacaccaccaactgttgaagttgtgacaggtgggaaacgtttcattaaagtcgatggcgatgtgacagcgacacaagccttggcgggagcttcctttgtcgtccgtgatcaaaacagcgacacagcaaattatttgaaaatcgatgaaacaacgaaagcagcaacttgggtgaaaacaaaagctgaagcaactacttttacaacaacggctgatggattagttgatatcacagggcttaaatacggtacctattatttagaagaaactgtagctcctgatgattatgtcttgttaacaaatcggattgaatttgtggtcaatgaacaatcatatggcacaacagaaaacctagtttcaccagaaaaagtaccaaacaaacacaaaggtaccttaccttcaaca

SEQ ID NO: 10 - DNA, 480 bp, Artificial Sequence
  Construct 10: EF1277 nt
atgaacatttttgctgtccgtttaaaagaggctttaacagccaagaacatcaaacctagtgatttagcgaaaaaaactggcatcggtaaatcttcgatcagcgattggctagctggtcgttacgaagcaaaacaagacaaagtttatcgcattgcagatgcattagacattaatgaggcctggttgatgggacaagaagttcccatggaaaaaaatgcctcaactatcgaccgcatttataaaaaattagaaccccaacgacaagccatcgtttatcaatttgccgaacaacaattacacgaacaacaaacgcaagcagaaattctctcattccctcgccgtgacgaaatgacactggctgcccacgctggggatccagaaaagatattttcaaaagaagagatcgagaaaattcacgattacttggatgaaattgatgccaaatatcaacaatcgatttcttctgacaaaaaagaggat

SEQ ID NO: 11 - DNA, 1617 bp, Artificial Sequence
  Construct 11: EF1355 nt
atggcttatcagtttaaattaccggatatcggtgaagggattgccgaaggcgaaatcgttaaatggtttgtaaaacctggcgatacaatcaacgaagacgatacgttattagaagtacaaaatgacaaatcagtggaagaaattccatcaccagtaacaggtactgtaaaaaatatcgttgtaccagaaggaacagttgcaaacgttggtgacgtgttaatcgaaatcgacgcacctggtcacgaagataacgatgcagcaccagcagctcctgcacaagaacaaacaccagcacaacctgctgctgtaccaacaaccgaagcagctggcggatttttccaattcaaattaccagacatcggtgaaggaattgccgaaggcgaaatcgttaaatggttcgttaaagcgggcgacacaattaatgaagatgattcattattagaagtacaaaatgacaaatcagtagaagaaattccatcaccagtaacaggtactgtaaaaaatatcgttgtaccagaaggaacagttgccaatgtgggtgacgtgttagttgaaattgacgcacctggtcataattcagcagcaccgtcagtcgcagcaccagctactgacgctcctaaagcggaagcatcagctccagccgcttcaacaggcgtagttgcagccgctgatccaaacaaacgcgttttagcaatgccatctgttcgtcagtatgcgcgtgaaaaagacgttgatattacacaagtaactgcaactggtaaaggtggccgtgtcattaaagcggatattgatgcctttgtctctggtggttctcaagcagccccagctactgaagctgccgcaacagaagcagcacctaaagcggaagcagctgcacctaaagcagcgccaaaagcctttacttctgatttaggcgaaatggaaacacgtgaaaaaatgacaccaacacgtaaagcaattgctaaagcaatggttaacagcaaacacactgctcctcacgtaacattacatgatgaagtagaagtttctaaattatgggatcaccgtaagaaatttaaagatgttgctgctgcaaatggtacaaaattaacattcttaccatacgttgtaaaagcattgacttcaactgttcaaaaattcccaatcttgaatgcatcaatcgatgacgcagcacaagaaattgtttacaaaaattactttaacattggtatcgctactgatacagatcatggcttatatgtaccaaatgttaaaaatgctaatacgaagagcatgtttgctatcgctgatgaaatcaacgaaaaagcagcattggctatcgaaggtaaattaactgcacaagatatgcgtgatggtacaatcacaattagtaacattggttcagtcggtggcggctggtttacaccagtaatcaactaccctgaagttgctattttaggcgttggtacaattgcacaagaaccagttgttaatgcagacggcgaaatcgttgtgggacgcatgatgaaattatcattaagctttgaccaccgtatcgttgacggcgcaactgctcaaaaagcaatgaacaacattaaacgcttattagctgatccagaattactattaatggaagga

SEQ ID NO: 12 - DNA, 564 bp, Artificial Sequence
  Construct 12: EF1692 nt
atggcaaaacgaattatcattatgaactttgatattgaaagtaaatcgtaccaagcattttccgaaataaaaaagatgcaggcagaaagacagcttaaaggtgagcaaatggcggttgttacgcatgttaatgatggccagcatcaatttaaaatcaatgattttatcgattttacaggcaacaatcatacatcaaaagatagcatgattgggatgctagtaggcatattaggtggtcctctgggcattctttttggctggtttgctggaagtatgtatggtgcaagcaaagacgccaaagaaattcaagaagcacaaacggtttttgaacatgtgattcaaaagattgatgaaggacaaacgggattgttattaattgcagaagaagaagacaaccgtccgctcaaccaattggttatgtttgacttaggtggcgaaatcacgcggcttgatttagaggaagtccaacaagaaattaacgatgcgaacgaagttgcaaatgaagcgaaacaatcgtggcaagcaaaaaaagaacaacacaaagaagcaacatcgaaagaagaa

SEQ ID NO: 13 - DNA, 1035 bp, Artificial Sequence
  Construct 13: EF2703-1 nt
ggtagctatttaaagaaaacaattgatataggctatgttcccataaaaaatgattataatgaagcgcaaaataaagatagtcaatcgtttttgattatggggctagacaatacaattgaacggaaattaggcacaactaggactgatgctatgatggtgattaccgtgaataacaagacgaagaaaataacctatttaagtttgccacgggatagttttgttcaaattgatgcgaaaaattaccaagggatgcagcgaattgaagccgcctatacctacgatggaccaacagcttctgttaacacagttgagaaattattgaatattccaatcaatcattacgttgtgtttaactttttatcttttattaagttaattgatgcggttggcggcatagatgtcaatgtcaagcaggcgtttgatggtgtcaccaaagacgggccaggatccattcattttgatgcagggaaacagcatttagatggtacgaaagctttatcttatgcccgtgaaagacatagcgataacgatattatgcgtggattccgacaacaagaaattattcaagcagttgaagacaagttgaaatctggtcaatcaatcatgaaaataatggacattattgattcgttaaatggaaacattcaaactgatgtggattccaatgaattgactcatttagtcaaagaaggtttgacttggaccaattatgataaacaacagctttcttttgactggcgcacttttagtaatgaagggcgcagtatggttgaactatacccagatagtattgaaaatgtccgtcatcaattacgtgtgtctttaaatttagaaaagccagatgaacgagatcaagacggctatgtcttccatacgaacggtgaatttttatatcaaagtgattataccgttcaagatgaagcagctgaggaaaacgaaatgacttccatcaacggcaatacgtatattggtgttcctggtaatacacagaccggcccgttgccatcagttaaaacggaaaatggctttataaaa

SEQ ID NO: 14 - DNA, 657 bp, Artificial Sequence
  Construct 14: EF3051-1 nt
ttttcaagttggtttgatgattcatatgtcaaagctagtgctgaatcaagtaaaacaaaagaaccagcaccagttaaaattgagaaaaaagtcaaacctttaagctatggacaacaggtcaatcaagaaattgaaaagaagcaatatgatggacatctggatttgccgttagaattgcagacagatgctaaatggaaagacaccgcatacggatttggcaatgtggataagccgaatacaatcgaaattaatggctgtgcgattgtatcgcttgcaatggttggttcatacatggatcaccaagaagttacccctctggatgtgttagcttgggcaaaaaatgacttctttatggaagggcaagggacggcgtggtctatttttagtgcatatgctgaaatgaaaggctataactgtcaagaaattggggatattgaaacagtggcagctttcttgaaggaaggtcatccagtcattatttctgtaaaaccgggctatttcactacaactggtcacattatggtgatgagtggtgtggatgaaaaaggcgatttctggattaatgatccaaacgattcagaagaaaagggccattcaaaacggacatttacagccgaagaagtgatgaatgaagcgttaaacttctgggcattttat

SEQ ID NO: 15 - DNA, 789 bp, Artificial Sequence
  Construct 15: EF3177 nt
atggacttacatttaaccgttgatctaaaaaaaacaaagacactcattgacttagccgatcaggcccacttaatcattgaacaaacaactaaattaccgaaaaaagaggcagcgattcttttcttgctaatagataaccaactagttgctttaggacttgctgaagaaaaagctacatataaagaagtttcttttgatcactcgattttattgaaaccgacttgggacacagaacttgcctatttagcgcaagctttcctagatgatgcgaaagaaagtggtttaacattggaagcaaccccaacgacagtcaaaattccgaaaagtgcggtagcgacagtgactaactataaagaaacagtcacctttatcttggaacgttttggctactctctgtttaaaaaaccggcgccgaagaaagccagaccagccaaagcacgccacaaatggacaaaagaagttagccaaattcctttttatattgatactcgacaaagcaaagcaactgttttttggcaaaagcgcaatgaaatgcttattaaagctggcgcgacaatgatgcccgaagcccctttaaataaagacgggtctgtcggtttctccgctagatttggtgaaaaacttcgtgatgaacgcaagggccaatttaaagactttgtcacaacggaagatatcgtcttaaaaagcgttaatgaagtcggcttgtttctctattttgctggaacaaacagctggttagagctagttgatgagaacggcaaaaccttaaatgaatggactgtggtggaa

SEQ ID NO: 16 - DNA, 999 bp, Artificial Sequence
  Construct 16: EF3183-1 nt
tctgaatttaattttgcggtcacaccaacaattcccgaaaatcaagtggataaatcaaaaacctactttgacttaaaaatggcgcctggtgccaaacaaaccgtagaaattcagttacgcaatgatacagatgaagacattaccattgaaaatacggtgaactcagcgacaacaaatttaaatggcgtagtagaatatggccaaaacgggatcaaacctgacaaaaccttacgttttaacttaaaagattatgtggaagcaccgaaagaaatcatcttgccgaagcattcccaaaagaccttacctttaaccattacgatgcctaaagattcttttgatggcgtgatggctggcggtataacactcaaagagaaaaagaaagaaacaacgacttctgcggatcaatcaaaagggttagctattaataatgaatactcctatgttgtggctattattcttcagcaaaatgagacaaaggttcaaccagatttaaaattactgggggttaaaccaggccaagtcaacgcgcgaaacgtcatcaatgtttctttacaaaacccacaagcggcctatttaaaccaattacatttaatcaacactgtttcaaaaggaggcgaaacgctttaccaatccgatactgaggatatgcaagtggcgccaaactctaactttagttacccaatttctttaaaaggggaacgattaacgccaggaaaatatgtcttgaaatcaacggcctatggtgtaaaagatgaaaagggcacctatcaagtcaaaggcgccaatggtgaagaacggtacctgtacaaatgggaatttacaaaagaatttactatttctggggacgtcgctaaagaattaaatgaaaaagacgtaaccattaaaggaaccaattggtggttgtatctactgattgcattaatcattctagcgctgctcttattgattttcttcttgtatcgtaaaaagaaaaaagaggaagaacaacaatctgagcaa

SEQ ID NO: 17 - DNA, 972 bp, Artificial Sequence
  Construct 17: EF3207 nt
atgtccaagaatttttgggcaacattgccaaagcccttttttgttttagcaccgatggaagatgtcactgatgtggtctttcgtcatgtcgtgaaagaagctggggcaccagatgtgctttttacagaatttactaattcggatagttattgtcatcctgaaggaaaagatagtgtacgcgggcgcctcgtttttacagaagatgaacagccgatggtggcacatatttggggggataaaccggaatttttccgtgaaatgagtatcggcgtagcggagatgggctttcaagggttagacataaatatgggctgtcctgtgcctaacgtggctgagcgtggaaaaggcagcgggctaattttgcgcccagaagtcgcggctgaattgattgacgctgccaaagcaggtggcttacctgttagtgtcaaaacacgcattgggtttactgaaatggcggaaatggaggcgtggatcacgcatttattagagcaagacattgcgaatctatccattcatttgcgaacacgaaaagagatgagcaaagtggatgcccattgggaggtcattccgcaaattatggctattcgggaccgtgtcgcaccgcaaacgacaattacgattaatggggatattcccgatcgtcaaaagggcctagaattagcagaacaatatggtgtagatggcatcatgattggtcgggggatttttaaaaatccttatgcctttgaaaaagaacccaaaacacatacgccacaagaattgctgggcttgctacgtttacaattggatttgcaagacaaatatgcggaattggtgcctcgctccatcgttgggctgcatcgcttctttaaaatttatgtcaaaggctttccaggtgccagtgatttaagagcacaattaatgaatacaaaatcaacggatgaagtgcgccagttgttagcgacgtttgaaacagaacatggtgtgcttgac

SEQ ID NO: 18 - DNA, 855 bp, Artificial Sequence
  Construct 18: EF3256-1 nt
gcagacaagaaagacaacacaacgaactcttctagcgcagcatcttcagaaacgaaaaaatcaacggaatcatcagcaccagcgaaaaaagttgccggtggcgatttaaaagatggtacgtataaattagaagaaaaaaatgaaaaaaatggttaccgtgcagtctttgaaatgactgtaaaagacggcaaaatcactgaatctaaatatgacaacatcaatgctgacggcaagtctaaaacagaagacactaagtatgaagaaagcatgaaagcaaaatctggtgttggaccaaaagaatacatcaaacaattaaacgattcttttgttaaagcacaaagcgcaagcggtgtggaagtagtaactggtgcgactcattcatctgaatcattccaaaactacgcacaacaattaatccaagcagcacaagctggtaacacagacacaatcgaaatcgacaatggggcaacattgaaagatggtacgtactcattgaaagaaaaaaatgactcaaacggctaccacacaacattctcaatgactgtgaaagatggtaaagtgactgaatctaactacgataacgtgaacgctgacggcaaatctaaaaaagatgacactgaatacgaaagcaaaatggaagacgttgctggcgttggaccaaaagaatatatcgaaacattaaacaaagaatttgttaaagcaatgggcgaagaagacggatcacctgcaggtgttgaagtagtaactggtgcaacacacagcacacattcattcatcaactacgcacaacaattagtgaacgctgctgaaaaaggcgacacaactgaaatcgttgttgacaacatcgtaacaaaa

SEQ ID NO: 19 - DNA, 693 bp, Artificial Sequence
  Construct 19: EFA0042-1 nt
tttgcacaagaaattatccctgatgatactacgacaccgcccattgaagtaccaacagaaccaagtacaccagaaaagccaacagatccaacaccgccaattgagccacctgtagaccctgtagagccacctattacaccaacggagccaacagaaccgacagagccgacaacaccaacagaacctgaaaaaccagtagttccaacggaaccgacaacaccaacagaaccgacaactcctacagagccaagtgaaccagaacaaccaacggagccaagtaaaccagtagaacctgaaaaaccagttacaccaagcaaaccagcagaacccgaaaaacctgtgacaccaactaaaccaacagaacctgaaaaaccagtacaaccagcagaaccaagcaagccaatcgacgttgttgtaacgccaacaggggaattaaatcacgctggaaatggtacacaacagccaacagtccctattgaaacaagtaatttggcagaaatcacacacgtgccaagtgtaacaacacctattacaactacagacggagaaaacattgtagctgtagaaaaaggtgttccacttacacaaacagcagaagggttaaaacctattcaatcgagttacaaagtattgcctagcggaaatgtagaagtaaaaggtaaggacggtaaaatgaaggttttaccatacaca

SEQ ID NO: 20 - DNA, 1332 bp, Artificial Sequence
  Construct 20: EFC0034-1 nt
aataaaaaaacaccaaaaccattaaccccacccaaagccttttttaactggtgtactgcacaaatacccacgtatgaatggcaaaacaaaaaggagacaattcttgcgagttctcgcaagaattgccctatcataaaaaaacgattaacaaaatactcacgattatcgtttccaacgaaattttactcctttggaatcattctcgttcgtgcaaaacgaattgaaattcaaacccatagttattggcagacgattacagatggaatagaaaaccttatctatgagccgtcaaaccttgaacggttttcaaacgatacccatgttaaagcccattatgagaacggacattggcatgagggcttgttagcaaattatggttttatgagtagtgcttatacaaatacagtattctatccaaataactggcaagaaaaactaaccactgtatcggaattaaagtacttacagttacctgaaatagaacgtcaagaactagctcatatttacaaataccgaaacgaaattgagtttttacaaaagataggtgccacaaccttagcgaatgaaatcatttttgacgactatcgcaacgtttttggactgtattttcataaagtagatatgagagtaattactaagaaatggctaaaagcgaataaacaaaaattaaaaacaagaaatccaacctttcatgaatacatgttagaaaaaacgttaaaagagcgaaatgcgcctatgataaacgaaatagaaaagtacgtgcattattcgcaaattaagcaactaccgaaagaagtgaacttaacaaagtttcaaaaatggtttatacgaaaaggggagcgttttgactattatatggactatttacacatgttagaagagttgaacaccccacttaataacgatagtgtattgtatcctgaaaacttacaagtagctcacgataacgctatgaacacgctaaaccttttgaaaagtgagattgaagaaaagcagtatcaagaacggaaaaaccaaattaaagcgttagaagctgaaattgacgatttgctttttctcacaccacattcattacaagaaatcattcaagaaggaagtattctacgccattgtgtgggcagtcaacactatatcgaacggcatacgcaaggaaaaacaacgattgtttttatccgaagaaaagaaaagccagatatgccttacttcacattagaatatcgaaatcaacaggttatacaaatacaaggaaaatgtaaccgtcaggaagtaccagaaaagataaaacaagcagtcagacaatggcaagagaatttacagcacgccttatcatca

SEQ ID NO: 21 - protein, 411 aa, Artificial Sequence
  Construct 1: EF0032-2 aa
MVTGILDDWNYASRSLYSEPYPDLKNLVDQTKKENDTFYRLENLNGVSANDGINYGYSGISMFSSVRNRHSSTYLNALGFRSRGTNLNIRYQNNTLLMDALMGIKYNIAENNPMKFGFERQAAAGKYQLYRNENALPLGFLADKEIYNVRQPLNDNLGSQTNLLNALANTNERYFTFYQPTMTLQNNVTITQNTAGVTFTEKQHNVAKEISYTVNVPANTQAYLSLFPTDFAQLESSTATVTVNGSSQQSQIGITGQYYNLGYYPKDTTVNFKVSFYGTKAVSFVQPQVVGLNTNAFEKAISAVQEKGVDLTTGKRSASGTFTADKDQVLVTTIPYDKGWRVKIDGKKVTPKAFKDAFLSVPVSAGTHTIQFSYLPEGLIPGIVLFVLCTGGFVAYVTLIPARRNRKKEDK

SEQ ID NO: 22 - protein, 183 aa, Artificial Sequence
  Construct 2: EF0270-2 aa
AIAAVVGFGLTFFFWKDNTVEEEEVIIDKTTIKKENITSPVKGRVLSLKNAEDPAFANGALGNGVVIEPTEGKVVAPFDGTIVTLFPTKHALGLISDNGTELLIHIGIDTVQLEGEGFEAFVKQGDRVKKGQTLVTFDLEGIKKAGFSTQIPIVVTNTADYLDILEVGSNEVSTSDDLLTALI

SEQ ID NO: 23 - protein, 370 aa, Artificial Sequence
  Construct 3: EF0428 aa
LPMIIKQEQFIPKDTVETTIDLLIRNLTTIKDNTGEFLLDFDGLKVDDKSWTIWNWPQGVGLYGIYKNYRNTKSEKALQVVNDWFEGRMQEGAPPKNVNTMAPLLTMAYLYEDTKDSKYIPYLEQWAEWVMEEMPRTNEGGLQHATYGPENKNQLWDDTLMMTVLPLAKIGKLLNRLDYLEEAKHQFLIHIKYLQDKKSGLWYHGWTFEGNHNYAEALWARGNCWITIAIPEIIEILELPKGDSLREFLLSTLNAQVAALAKYQDESGLWHTLINDSNSYLESSATAGFAYGILKAVHKKYISSEYEEVANKAIAGLLNEIDETGEVQHVSVGTGMGDNLDFYRTIGMTAMPYGQSLTILCLTELLVSYC

SEQ ID NO: 24 - protein, 272 aa, Artificial Sequence
  Construct 4: EF0779-2 aa
GYIIFNAVYLTGLLESKPLIISHRGVTNSNGVQNTIPAMERTIKFKPDYIEIDVQETKDHQFVVMHDANLQELAGVDGTPQEFTLAELTKMTVKENGQEAPIASFDDYLAKANQAKQKLLVEIKTSKQDSQGALSNFIEKYERPLIKNNHQVQSLDYNVIKAFKKAKSKVKVSFILPYNFTFPETQADLYTMEATTLNDTFILKADQQKKAVYAWTVNDSEVLSKMLFMDVAGVITDDLELVNEEVNDFEKNPSYADRILHYIFMLPSVASQ

SEQ ID NO: 25 - protein, 181 aa, Artificial Sequence
  Construct 5: EF0792-1 aa
LAQGNRLAVDQWQANQVVLSKEANSNLNVSVLDENVKETISGGKIAPIGQQSLAIRPADDKKAELTNVSLFGIEKESFLMPKVIEGNAFTDKNQVIASETLKNQGFKIGDKLTAGKYDEQLEIVGFISKSSYNIVPVIYTSLDTWRSIKYGDNPAMAKMVNGFIVRSKDNTEVKTTNKDSQ

SEQ ID NO: 26 - protein, 270 aa, Artificial Sequence
  Construct 6: EF1026 aa
MKKEIIVYTISDSLGETSQKLLAAASAQYPDISFLNRYNFSFVTTEEELLEILKDALKDKALVVSTLVSKQLITAAKEFSERTGLLYLDLMAPFFELIQAKAGVDPIEEPGRRHQLDRAYFDKISAIEFAVKYDDGKNPQGFLDSDILLLGVSRTSKTPVSMYLANQGYRVSNLPLIPEVPLPPILEEMDPQKMIGLVCSPETLGQIRSSRLASLGLGNETSYTNVERIEQELAYAEEIFAKYGIPVIDVTAKSVEETAFLIKEKLDERN

SEQ ID NO: 27 - protein, 745 aa, Artificial Sequence
  Construct 7: EF1032 IB aa
MEWIEIKHATQNNLKNISVNIPKKQLTVVTGLSGSGKSSLVFDTLAAESRRELNDTFSSFVQNYLPKYGRPEVEKIENLPVAIVIDQKKVAGNSRSTVGTYTDIYTFLRLLFSRAGSPFVGYSDTFSFNHPDGKCPTCDGLGKITEINLHQLVDYDKSLNKGPIDFPTFTVGNWRWKRYAHSGLFDLDKKIKDYSPEELALFLYAPQQKLANPPKEWPHTALYEGIVPRMQRSILHTDEGKRHQKYLNHFVTVKRCPDCLGSRVNERVRSCKINQKSIADAVDMPLTELHSFIRSMDLSLIKTIQEELLVRLEALINIGLSYLTLGRATETLSGGEAQRIKIAKYVNSALNDIMYILDEPSAGLHPKDIERISRALLNLKNKGNTVVLVEHNPQLIREADFIIDIGPFAGENGGHVQFSGTYDAFLVSKTLTSQALQEPLPLNDQPRKARKSLSIEHATLHNLNNLSVEVPLGVLTVICGVAGSGKSSLAEEIYQKAQADNQEIIHLSQKSITANLRSTPMTYLNIFDKVRKLFAEENHVSPALFSYNSKGACPTCKGKGIIVSDMSFMEDVTSICETCHGTRYKEEVLHYLYNGKNIVEVLALSVKDGYDFFKDQPFALSLKNLLEVGLSYLKLNQSLSTLSGGELQRVKLADTLHQKKAIYLMDEPTDGLHLIDIQQSLQLFNRMVEEGNSLILLEHHIDVIKSADWLIELGPEGGKNGGQLLFTGTPANMLNSTHSITKGYL

SEQ ID NO: 28 - protein, 526 aa, Artificial Sequence
  Construct 8: EF1060-1 aa
DSNKAAEQKIAISSEAAISTMEPHTAGDTTSTLVMNQVYEGLYVLGKEDELELGVAAEEPAISEDETVYTFKIREDAKWSNDDPVTANDFVYAWQQVASPKSGSIHQALFFDVIKNAKEIALEGADVNTLGVKALDDKTLEITLERPTPYLKSLLSFPVLFPQNEKYIKEQGDKYATDAEHLIYNGPFKLKEWDNASSDDWTYEKNDTYWDAEKVKLTEAKVSVIKSPTTAVNLFDSNELDVVNKLSGEFIPGYVDNPAFLSIPQFVTYFLKMNSVRDGKENPALANNNIRKALAQAFDKESFVKEVLQDQSTATDQVIPPGQTIAPDGTDFTKLAAKKNNYLTYDTAKAKEFWEKGKKEIGLDKIKLEFLTDDTDSAKKAAEFFQFQLEENLDGLEVNVTQVPFTIRVDRDQTRDYDLELSGWGTDYRDPLTVMRIFTSDSTLGGVTFKSDTYDQLIQETRTTHAADQEARLNDFAQAQDILVNQETVLAPIYNRSISVLANQKIKDLYWHSFGPTYSLKWAYVN

SEQ ID NO: 29 - protein, 562 aa, Artificial Sequence
  Construct 9: EF1093-1 aa
EENGESAQLVIHKKKMTDLPDPLIQNSGKEMSEFDKYQGLADVTFSIYNVTNEFYEQRAAGASVDAAKQAVQSLTPGKPVAQGTTDANGNVTVQLPKKQNGKDAVYTIKEEPKEGVVAATNMVVAFPVYEMIKQTDGSYKYGTEELAVVHIYPKNVVANDGSLKKVGTAENEGLNGAEFVISKSEGSPGTVKYIQGVKDGLYTWTTDKEQAKRFITGKSYEIGENDFTEAENGTGELTVKNLEVGSYILEEVKAPNNAELIENQTKTPFTIEANNQTPVEKTVKNDTSKVDKTTPSLDGKDVAIGEKIKYQISVNIPLGIADKEGDANKYVKFNLVDKHDAALTFDNVTSGEYAYALYDGDTVIAPENYQVTEQANGFTVAVNPAYIPTLTPGGTLKFVYFMHLNEKADPTKGFKNEANVDNGHTDDQTPPTVEVVTGGKRFIKVDGDVTATQALAGASFVVRDQNSDTANYLKIDETTKAATWVKTKAEATTFTTTADGLVDITGLKYGTYYLEETVAPDDYVLLTNRIEFVVNEQSYGTTENLVSPEKVPNKHKGTLPST

SEQ ID NO: 30 - protein, 160 aa, Artificial Sequence
  Construct 10: EF1277 aa
MNIFAVRLKEALTAKNIKPSDLAKKTGIGKSSISDWLAGRYEAKQDKVYRIADALDINEAWLMGQEVPMEKNASTIDRIYKKLEPQRQAIVYQFAEQQLHEQQTQAEILSFPRRDEMTLAAHAGDPEKIFSKEEIEKIHDYLDEIDAKYQQSISSDKKED

SEQ ID NO: 31 - protein, 539 aa, Artificial Sequence
  Construct 11: EF1355 aa
MAYQFKLPDIGEGIAEGEIVKWFVKPGDTINEDDTLLEVQNDKSVEEIPSPVTGTVKNIVVPEGTVANVGDVLIEIDAPGHEDNDAAPAAPAQEQTPAQPAAVPTTEAAGGFFQFKLPDIGEGIAEGEIVKWFVKAGDTINEDDSLLEVQNDKSVEEIPSPVTGTVKNIVVPEGTVANVGDVLVEIDAPGHNSAAPSVAAPATDAPKAEASAPAASTGVVAAADPNKRVLAMPSVRQYAREKDVDITQVTATGKGGRVIKADIDAFVSGGSQAAPATEAAATEAAPKAEAAAPKAAPKAFTSDLGEMETREKMTPTRKAIAKAMVNSKHTAPHVTLHDEVEVSKLWDHRKKFKDVAAANGTKLTFLPYVVKALTSTVQKFPILNASIDDAAQEIVYKNYFNIGIATDTDHGLYVPNVKNANTKSMFAIADEINEKAALAIEGKLTAQDMRDGTITISNIGSVGGGWFTPVINYPEVAILGVGTIAQEPVVNADGEIVVGRMMKLSLSFDHRIVDGATAQKAMNNIKRLLADPELLLMEG

SEQ ID NO: 32 - protein, 188 aa, Artificial Sequence
  Construct 12: EF1692 aa
MAKRIIIMNFDIESKSYQAFSEIKKMQAERQLKGEQMAVVTHVNDGQHQFKINDFIDFTGNNHTSKDSMIGMLVGILGGPLGILFGWFAGSMYGASKDAKEIQEAQTVFEHVIQKIDEGQTGLLLIAEEEDNRPLNQLVMFDLGGEITRLDLEEVQQEINDANEVANEAKQSWQAKKEQHKEATSKEE

SEQ ID NO: 33 - protein, 345 aa, Artificial Sequence
  Construct 13: EF2703-1 aa
GSYLKKTIDIGYVPIKNDYNEAQNKDSQSFLIMGLDNTIERKLGTTRTDAMMVITVNNKTKKITYLSLPRDSFVQIDAKNYQGMQRIEAAYTYDGPTASVNTVEKLLNIPINHYVVFNFLSFIKLIDAVGGIDVNVKQAFDGVTKDGPGSIHFDAGKQHLDGTKALSYARERHSDNDIMRGFRQQEIIQAVEDKLKSGQSIMKIMDIIDSLNGNIQTDVDSNELTHLVKEGLTWTNYDKQQLSFDWRTFSNEGRSMVELYPDSIENVRHQLRVSLNLEKPDERDQDGYVFHTNGEFLYQSDYTVQDEAAEENEMTSINGNTYIGVPGNTQTGPLPSVKTENGFIK

SEQ ID NO: 34 - protein, 219 aa, Artificial Sequence
  Construct 14: EF3051-1 aa
FSSWFDDSYVKASAESSKTKEPAPVKIEKKVKPLSYGQQVNQEIEKKQYDGHLDLPLELQTDAKWKDTAYGFGNVDKPNTIEINGCAIVSLAMVGSYMDHQEVTPLDVLAWAKNDFFMEGQGTAWSIFSAYAEMKGYNCQEIGDIETVAAFLKEGHPVIISVKPGYFTTTGHIMVMSGVDEKGDFWINDPNDSEEKGHSKRTFTAEEVMNEALNFWAFY

SEQ ID NO: 35 - protein, 263 aa, Artificial Sequence
  Construct 15: EF3177 aa
MDLHLTVDLKKTKTLIDLADQAHLIIEQTTKLPKKEAAILFLLIDNQLVALGLAEEKATYKEVSFDHSILLKPTWDTELAYLAQAFLDDAKESGLTLEATPTTVKIPKSAVATVTNYKETVTFILERFGYSLFKKPAPKKARPAKARHKWTKEVSQIPFYIDTRQSKATVFWQKRNEMLIKAGATMMPEAPLNKDGSVGFSARFGEKLRDERKGQFKDFVTTEDIVLKSVNEVGLFLYFAGTNSWLELVDENGKTLNEWTVVE

SEQ ID NO: 36 - protein, 333 aa, Artificial Sequence
  Construct 16: EF3183-1 aa
SEFNFAVTPTIPENQVDKSKTYFDLKMAPGAKQTVEIQLRNDTDEDITIENTVNSATTNLNGVVEYGQNGIKPDKTLRFNLKDYVEAPKEIILPKHSQKTLPLTITMPKDSFDGVMAGGITLKEKKKETTTSADQSKGLAINNEYSYVVAIILQQNETKVQPDLKLLGVKPGQVNARNVINVSLQNPQAAYLNQLHLINTVSKGGETLYQSDTEDMQVAPNSNFSYPISLKGERLTPGKYVLKSTAYGVKDEKGTYQVKGANGEERYLYKWEFTKEFTISGDVAKELNEKDVTIKGTNWWLYLLIALIILALLLLIFFLYRKKKKEEEQQSEQ

SEQ ID NO: 37 - protein, 324 aa, Artificial Sequence
  Construct 17: EF3207 aa
MSKNFWATLPKPFFVLAPMEDVTDVVFRHVVKEAGAPDVLFTEFTNSDSYCHPEGKDSVRGRLVFTEDEQPMVAHIWGDKPEFFREMSIGVAEMGFQGLDINMGCPVPNVAERGKGSGLILRPEVAAELIDAAKAGGLPVSVKTRIGFTEMAEMEAWITHLLEQDIANLSIHLRTRKEMSKVDAHWEVIPQIMAIRDRVAPQTTITINGDIPDRQKGLELAEQYGVDGIMIGRGIFKNPYAFEKEPKTHTPQELLGLLRLQLDLQDKYAELVPRSIVGLHRFFKIYVKGFPGASDLRAQLMNTKSTDEVRQLLATFETEHGVLD

SEQ ID NO: 38 - protein, 285 aa, Artificial Sequence
  Construct 18: EF3256-1 aa
ADKKDNTTNSSSAASSETKKSTESSAPAKKVAGGDLKDGTYKLEEKNEKNGYRAVFEMTVKDGKITESKYDNINADGKSKTEDTKYEESMKAKSGVGPKEYIKQLNDSFVKAQSASGVEVVTGATHSSESFQNYAQQLIQAAQAGNTDTIEIDNGATLKDGTYSLKEKNDSNGYHTTFSMTVKDGKVTESNYDNVNADGKSKKDDTEYESKMEDVAGVGPKEYIETLNKEFVKAMGEEDGSPAGVEVVTGATHSTHSFINYAQQLVNAAEKGDTTEIVVDNIVTK

SEQ ID NO: 39 - protein, 231 aa, Artificial Sequence
  Construct 19: EFA0042-1 aa
FAQEIIPDDTTTPPIEVPTEPSTPEKPTDPTPPIEPPVDPVEPPITPTEPTEPTEPTTPTEPEKPVVPTEPTTPTEPTTPTEPSEPEQPTEPSKPVEPEKPVTPSKPAEPEKPVTPTKPTEPEKPVQPAEPSKPIDVVVTPTGELNHAGNGTQQPTVPIETSNLAEITHVPSVTTPITTTDGENIVAVEKGVPLTQTAEGLKPIQSSYKVLPSGNVEVKGKDGKMKVLPYT

SEQ ID NO: 40 - protein, 444 aa, Artificial Sequence
  Construct 20: EFC0034-1 aa
NKKTPKPLTPPKAFFNWCTAQIPTYEWQNKKETILASSRKNCPIIKKRLTKYSRLSFPTKFYSFGIILVRAKRIEIQTHSYWQTITDGIENLIYEPSNLERFSNDTHVKAHYENGHWHEGLLANYGFMSSAYTNTVFYPNNWQEKLTTVSELKYLQLPEIERQELAHIYKYRNEIEFLQKIGATTLANEIIFDDYRNVFGLYFHKVDMRVITKKWLKANKQKLKTRNPTFHEYMLEKTLKERNAPMINEIEKYVHYSQIKQLPKEVNLTKFQKWFIRKGERFDYYMDYLHMLEELNTPLNNDSVLYPENLQVAHDNAMNTLNLLKSEIEEKQYQERKNQIKALEAEIDDLLFLTPHSLQEIIQEGSILRHCVGSQHYIERHTQGKTTIVFIRRKEKPDMPYFTLEYRNQQVIQIQGKCNRQEVPEKIKQAVRQWQENLQHALSS

SEQ ID NO: 41 - protein, 345 aa, Artificial Sequence
  Construct 13m: EF2703-1 aa
GSYLKKTIDKGYVPIKNDYNEAQNKDSQSFLIMGLDNTIERKLGTTRTDAMMVITVNNKTKKITYLSLPRDSFVQIDAKNYQGMQRIEAAYTYDGPTASVNTVEKLLNIPINHYVVFNFLSFIKLIDAVGGIDVNVKQAFDGVTKDGPGSIHFDAGKQHLDGTKALSYARERHSDNDIMRGFRQQEIIQAVEDKLKSGQSIMKIMDIIDSLNGNIQTDVDSNELTHLVKEGLTWTNYDKQQLSFDWRTFSNEGRSMVELYPDSIENVRHQLRVSLNLEKPDERDQDGYVFHTNGEFLYQSDYTVQDEAAEENEMTSINGNTYIGVPGNTQTGPLPSVKTENGFIK

SEQ ID NO: 42 - protein, 324 aa, Artificial Sequence
  Construct 17m: EF3207 aa
MSKNFWATLPKPFFVLAPMEDVTDVVFRHVVKEAGAPDVFFTEFTNSDSYCHPEGKDSVRGRLVFTEDEQPMVAHIWGDKPEFFREMSIGVAEMGFQGLDINMGCPVPNVAERGKGSGLILRPEVAAELIDAAKAGGLPVSVKTRIGFTEMAEMEAWITHLLEQDIANLSIHLRTRKEMSKVDAHWEVIPQIMAIRDRVAPQTTITINGDIPDRQKGLELAEQYGVDGIMIGRGIFKNPYAFEKEPKTHTPQELLGLLRLQLDLQDKYAELVPRSIVGLHRFFKIYVKGFPGASDLRAQLMNTKSTDEVRQLLATFETEHGVLD

SEQ ID NO: 43 - protein, 285 aa, Artificial Sequence
  Construct 18m: EF3256-1 aa
ADKKDNTTNSSSAASSETKKSTESSAPAKKVAGGDLKDGTYKLEEKNEKNGYRAVFEMTVKDGKITESKYDNINADGKSKTEDTKYEESMKAKSGVGPKEYIKQLNDSFVKAQSASGVEVVTGATHSSESFQNYAQQLIQAAQAGNTDTIEIDNGATLKDGTYSLKEKNDSNGYHTTFSMTVKDGKVTESNYDNVNADGKSKKDDTEYESKMKDVAGVGPKEYIETLNKEFVKAMGEEDGSPAGVEVVTGATHSTHSFINYAQQLVNAAEKGDTTEIVVDNIVTK

SEQ ID NO: 44 - protein, 444 aa, Artificial Sequence
  Construct 20m: EFC0034-1 aa
NKKTPKPLTPPKAFFNWCTAQIPTYEWQNKKETILASSRKNCPIIKKRLTKYSRLSFPTKFYSFGIILVRAKRIEIQTHSYWQTITDGIENLIYEPSNLERFSNDTHVKAHYENGHWHEGLLANYGFMSSAYTNTVFYPNNWQEKLTTVSELKYLQLPEIERQELAHIYKYRNEIEFLQKIGATTLANEIIFDDYRNVFGLYFHKVDMRVITKKWLKANKQKLKTRNPTFHEFMLEKTLKERNAPMINEIEKYVHYSQIKQLPKEVNLTKFQKWFIRKGERFDYYMDYLHMLEELNTPLNNDSVLYPENLQVAHDNAMNTLNLLKSEIEEKQYQERKNQIKALEAEIDDLLFLTPHSLQEIIQEGSILRHCVGSQHYIERHTQGKTTIVFIRRKEKPDMPYFTLEYRNQQVIQIQGKCNRQEVPEKIKQAVRQWQENLQHALSS

SEQ ID NO: 45 - DNA, 2616 bp, Enterococcus faecalis
atgaaaaataaaagtaggcagtttttaaaaaacaactggccttatatgttagccagtttcttcattccatttttaattatggcaattatctatttgagtattgggatttatccaggaagtagtcgcagtgttttagccagcgatgccttttctcaattttcaaattttcacgcaagctttaacaatgttcttcatggaaaacaaagtcttttctatacgtggaatgcttctttgggactaaactacttgtccttaatttcctattatcttggtggcttatttacgccgctcgtctttttctttaacaatcaaaacatgcctgatgcgctctatttcctaacgttgttgaaaattgggagtgctggcttgagtttttggttcttggcaaaacaaacctttaagattcctaaatggtcccatgtgactttaagtgtgtcttatgcgctaatgtccttcattgtggcccattcagaattaattatgtggctggatgcctttatttatctgccactcgtaattttaggaattcatcgtttaatggaccaacgaaaaccgacattattgtttgtcagttatttcttgcttttcattacaaattattattttggctttatgattgggttgttttccttcctgtactattttgcacgaacgtttacagactggcaacgatataaatctcgaatcgttgcgtattttactacttctcttttagctggtggagcatccatgattatggtcttacctgctgtcttagatttacgaaccaatggtgaaactctttctgaaattacaacctttaaaacagaagcgactgcctttttagatattattatgaaaaatatgattggcgtttacgatacaaccaaatatgggtccattccttttatttacattgggttgttgcctttgattttttgtctcttctatttcgttacgaaagaagttccattgaaaaacaaactactttttggcagtttgtttgtcctattgattgctagcttttacatcacgcccttaaatttattctggcacggtatgcatgcgccgaacatgtttcttttccgctatagtttcctcttttcattcttagttattttgcttgcaggttatggttgggagaaatttgaaaaggatgatctcggtgtcttaagcggcttgattttgattcttttagcaatttttgctcttgcaatgggcacaaaaggtgctactagttatacgtatgtgactttaacctctttcgtattaacggcaacttttttactattatactttttcgggattgctttttatcaattgaaaaaagcgcctatgcaatacttagtgattttgttattgctgctcgtttctggtgaagcaatcattaacacacgggcgatggtcactggtattttagatgattggaactacgcatcacgcagcttgtattctgagccttatcctgacttaaaaaatctagtcgatcaaacaaaaaaagaaaatgataccttttaccgcttggaaaatttaaatggtgtttcggccaatgacggcattaactatggctacagtggcattagcatgttttcttccgtacggaaccgacattcttcaacatacctaaacgccttaggtttccgctcacgaggcacgaatttaaatattcgttaccaaaataataccttgttaatggatgctttgatgggcattaaatacaatattgctgaaaacaatccaatgaaattcggctttgagcgacaagctgctgctggtaaatatcagctttatcgtaacgaaaatgctttgccgttaggatttttagcagacaaagagatttacaatgtccggcaacctctcaatgataatttaggtagtcaaacaaatttactaaatgctttagccaatactaatgaacggtattttaccttttatcaaccaacgatgacgcttcaaaataacgtgacaattacgcaaaatacagctggcgtaacttttacggagaaacaacataacgtagccaaagagatttcttatacagtcaatgtgcccgccaatacgcaagcttatttgagtttattcccaacggattttgctcaattggaaagttccactgcgacggtcaccgtgaacggctcaagtcagcaatcacaaattggcattactggccaatattataacttaggttactatcccaaagatacaaccgttaacttcaaagtaagtttttatggaaccaaagcagtaagttttgttcagccgcaagtggttggcttaaataccaatgcatttgaaaaagccatttccgccgtgcaagaaaaaggcgttgatttaacaactggcaaacgctctgcttcaggtacctttaccgccgacaaagatcaagtactcgtcactacaattccttatgacaaaggttggcgtgtcaaaattgatggcaaaaaagttaccccaaaagcctttaaagatgcctttctaagcgttcctgtcagcgctggaacccatactattcagttctcttatttaccagaaggattgattcctggcatcgtgttattcgttctatgtactggtggtttcgttgcctacgtaaccttgattcctgctagacgaaaccgtaaaaaagaagacaaataa

SEQ ID NO: 46 - DNA, 1899 bp, Enterococcus faecalis
atgggaaaatatcatgaactagcagaaaaaattgtaaaaaatgtcggtgggcaagagaatattaatagtttgacacattgtatcacacgtcttcgcttcaaattaaaagatgagagtcaagcgaatgatgatgtcttaaaaaatatggacggtgtggtaactgttatgaaaagcggtggacaataccaagtcgttattgggaaccatgttccagccgtttacgaagaagtagttagtattgcaggcttgtcaggagaacgtgaagaagaagcttccagtgggaatttatttgatcgcttaatagatattttaagtggttgtttccaaccctttttaggggcgttagcagcggctgggatggtcaaagggttaaatgccttattggttttcttaaagctctatacggctacgtcagggacttataccatgttaaatgggattggcgatgcaattttctactttatgccagttattttaggttatacagcagctaaaaaattccggttgcatccaatggtagggatcgtgattggcgcagctttatgttacccaacgattcaaggaagtgcattacaaacggcctttgaaacaacagcgggtgccggagccgcagcaccgtataatttattcggtttacctgcctataatacatttatggggattccttgggtcggtgcgaactatacaagtagtgtcgtaccaatcatcttcattattgcttttgcggcacaagttcaaaaagtgtttaaacgtattattccagaagttgttcaaacgttcttagtaccgtttttcgtcttgttgattgccttaccaattggtttcttagtaattgggccaatcgttagcatgctaacagatttattaagcgctggctttacagcattaatgagtttctcaccagctttgtatggtttgattcttggtttcttctggcaagtcttagttatttttggtttacattggagcgttgtgccattagctattatgcaagtgacacaagaaggttcaagccaagtattaacgggatcatttgcagctagttttgcgcaaacagcggttgttttagcgatgttcttcaaattgaaagataaaaagttaaaagctttgtgtccgccagcaattatctctggtatttttggtgtaacagagccagcaatttatggaatcactttaccaaaaaaatggccatttatttattcaatgattggtggcgctgtcggtggtttatatttgatgatcaacaatgtgacagcttatacaatgggtggtttaggaatttttggtgtgctaaactttatcaatggtgatgatgcaagtgggatgatccagtcctttattgcaattgccattgcagcggtcgttggttttggtctaacattcttcttctggaaagacaatacagttgaggaagaagaagtgattattgataaaacaacgattaaaaaagaaaatattacaagtccagtcaaaggacgagtgttatctttaaaaaatgcagaggatcctgcttttgcaaatggagcattaggaaatggggtcgtgattgaaccaacggaaggtaaagtggttgcaccctttgatggaacgattgtcacactattcccaacaaaacatgcattaggtttgatttcagataacggcacagaattattgattcatattgggattgatacagttcaattagaaggcgaaggctttgaagcttttgtaaaacaaggtgaccgcgtgaaaaaaggtcaaacattagtaacctttgatttagaaggaattaaaaaagctgggtttagtacacaaattccaatcgttgtgacgaatacagcggattatttagatattttggaagtcggcagtaatgaagtttcaacaagtgatgatttgctgaccgctttaatataa

SEQ ID NO: 47 - DNA, 1113 bp, Enterococcus faecalis
ttgccgatgattattaaacaggaacaattcataccaaaagatacagtagaaacaacgattgacttattaattagaaatttaacaacgattaaagataacacaggtgaatttctgttagattttgatggtttaaaagttgatgacaaaagttggacgatttggaactggccgcaaggcgttgggttgtatggtatatataagaattatcgaaatactaaaagtgaaaaagctttacaagtagttaacgactggtttgaaggtcggatgcaagaaggcgcgccgcctaagaatgtgaatacgatggctccgcttttaacaatggcttatctatatgaagacactaaagactctaaatatataccttacttagagcaatgggcggaatgggtgatggaagaaatgccccgaacgaatgaaggtggcttgcaacatgcgacatatggaccagaaaataaaaatcaattatgggatgatacgttaatgatgactgtcttacctttggcaaaaattggtaagttgttgaatcgactcgattatttggaagaagcaaagcatcaatttttaatccatattaaatatttacaagataaaaaaagtggtctatggtatcacggttggacttttgagggaaatcataactatgcggaagcactgtgggcaagaggaaactgctggattacgattgctattccagaaattattgaaatcttagagttgccaaaaggagatagtttacgggaatttttattgagtaccctcaatgcgcaagtggcagctttagcgaaataccaagatgaatctggtttatggcatacattaattaatgattcaaattcgtatttagaatcttctgctacagcgggattcgcttatgggattttaaaagcggttcataaaaaatatatttcttctgaatatgaagaagtggcaaacaaagcaattgctggcttactaaatgagattgatgaaacgggagaagtacaacatgtgtcagttggtacaggaatgggtgataatttagatttttatcgcacaattggaatgacagcgatgccttatggtcaatcattaacaatcctatgtttgactgaattgcttgtttcttattgctag

SEQ ID NO: 48 - DNA, 1788 bp, Enterococcus faecalis
atgtctgcttggcaaacatttaaaaatggaacaaggcaattttttaaagacatcttgcagtatttatggttattttttactttaaatgtcttattattattggtgggtggggcttttagttgggctacttccaacgcactaaaaactcaaggtattccttatctttcgtttaataacctgaatttattgttagaaaagccgcttgctctggtgttattaattctcttgttgttactttttttaggtgcagttttttatcagtttacctttttattattagggatttttcaaatacggcaagaccatcgctttcattttaaaggagttaccaaggcatcttttaaggttcttaaaaagcaaggtgcccgttcgtggttattctttttcggttattttgttgtcattgtcccttttggtaacctgattttccaaagtaatctattgacgaaatttgtgattccagattttattgttgaatttttgtcccaacgaattccttacttggtggggttactggcctttgggttattagtctggtatttagctattcgtttcatttacacgcttccattaatgattctggagagaaaaaaagcgggcgaggcagttaaggctagttggtcaatgacaaacaaacgattatggttcattattcgtaatattgcatttgtgacgatcgcggtatttgtttcaacgtatgttatttatgtgttactttatcttctacagttgaagttagataccttgagcgataccattagcttgctaggtgggattttaaatttaaccgttgtccaatttttacagtttgtctctaatgcttggctttcagtattactgattaatttcttatatacacaattaaatgttcaagcagaaacgacgacaaaagttgcctttgacaaagaaacgaaacgtaataaattagtgactatcgggatgggcctaggactattcaccatttttggcggctatataattttcaacgctgtttacttaacagggctattagaatcaaaacctttgattatttcgcatcgaggggtcaccaatagtaatggcgtacaaaataccattcctgctatggaaagaaccattaaatttaaaccagattatattgaaattgatgttcaagaaaccaaagaccatcaatttgttgtgatgcatgatgcaaaccttcaagaactcgccggcgttgatggcacgccgcaagaatttacgttggctgaattaacaaaaatgaccgttaaagaaaatggccaagaagcaccaattgccagttttgatgattatttagcgaaagcaaaccaagccaaacaaaaattactagtagaaattaaaacgtctaaacaagatagtcaaggtgcgctttctaactttattgaaaaatatgaacgtcctctgataaagaataaccatcaggttcaatctctcgactacaatgtgatcaaagcgtttaaaaaagccaaatcaaaagtaaaagttagttttattttgccctataatttcacttttccagaaacacaagctgatttgtatacaatggaagctactacgttgaatgataccttcattttaaaagctgaccaacagaaaaaagcagtttatgcttggacagttaatgactcagaggtattgagtaaaatgctctttatggacgttgctggagtgattaccgatgatttggagttagtcaatgaagaagtcaatgactttgaaaaaaatccgtcgtatgcggatcgtattttgcattatatttttatgctaccaagtgtggcttctcaataa

SEQ ID NO: 49 - DNA, 1080 bp, Enterococcus faecalis
atgtttttaggatttaatgaaatgaagtattcaaaaggacggtacgtccttgtagtcttagtaatggtcttgattgcttggttaatttttattttgtcaggtttagcgaacggtttagctcaaggaaatcgtttagccgtagatcaatggcaagcgaatcaagtggttttatcaaaagaggccaatagtaatttaaatgtatcagtgttagatgaaaacgtgaaagaaacgatttcaggaggcaaaattgcaccgattggtcaacaatctttagccatccgcccagcagatgataaaaaggctgaattaacgaatgttagcttatttgggattgaaaaagaaagttttttaatgccaaaagtgattgaaggaaacgcatttactgataaaaatcaagtgattgcttcagaaacattgaaaaatcaaggatttaaaattggcgacaaattaactgcagggaaatatgatgagcaattagaaattgtcggctttatttctaaaagtagctataacattgtgccagttatttacacttctctggatacttggcggtcaattaaatatggtgacaatccagcaatggccaaaatggttaatggtttcattgttcgcagcaaggacaacacggaagttaaaacgactaataaagacagccaagttctttcaatttcagattttattgaaaaactgccaggatacagcgctcaaaacttgaccttggatggcatgatttatttcttgattgtgattgcagcgttcattatcggtatttttatctttgtgatgactttacagaaaacagcaatgttcggcgtcttaaaagttcaaggggtgccaactagtttcttagcaaaggcagtcatgctacaaaccgctttattggctgttctaggagtggcgattggtcttgctttaacgggaattaccgtgctctttttaccagaagcgatgccttatgcaactaatggaccacgcatgattttgtttagtgtactattgattttatctgcattaattggcggggcattttcaattcgaacgattgctaaaattgatccgttaatcgcgattggaggttag

SEQ ID NO: 50 - DNA, 813 bp, Enterococcus faecalis
atgaaaaaagagatcattgtttatactatttccgattcacttggagaaacatcacaaaaattgttagctgcagcaagcgcacaatatccagatatttcttttcttaatcgatacaatttttcttttgtcacaacagaagaagaattattagagattttaaaagatgccttaaaagataaagccttagttgtcagtacattagtcagtaaacaactaatcacagcggcgaaagaatttagtgaacgaacagggttgttatatttagatttaatggcgccattttttgaattaattcaagcgaaagccggagtagatcctattgaagagcctggacgacgccaccaactagatcgtgcctattttgataaaatctcagcgattgaatttgctgtaaaatatgatgatggcaaaaatcctcaagggtttcttgattctgatatattgttgttaggcgtttcgcggacctcaaagacgccagtcagtatgtatttagcgaatcaaggctaccgcgtttctaacttaccattaattccagaagttccattgccgccaattttggaagaaatggatccacaaaaaatgattggtttagtttgttcgccagaaacattaggacagattcgtagcagtcggttggcttccttaggtttaggtaatgagaccagttataccaatgttgaacggattgaacaagaattagcttatgccgaagagatttttgcgaagtatggcatcccagtgattgatgtaaccgcaaaatctgtcgaagaaacagcctttttaattaaagaaaaactagatgaaagaaattaa

SEQ ID NO: 51 - DNA, 2238 bp, Enterococcus faecalis
atggaatggattgaaattaagcacgcaacacaaaataatttgaagaatatctctgtcaatatccctaaaaagcaactaactgttgttactggactttcgggttcaggaaagtcctccttagtatttgacacattagccgctgaatcacgtcgtgaactaaatgatacatttagttcgtttgttcaaaattacttacccaaatatggtcgtccagaagttgaaaaaatcgagaatcttcctgttgcaattgtcattgaccagaaaaaagtagcaggtaattctcgttcgacagtgggaacgtacacagatatttatacgtttttacgtttgctgttttcacgagcaggttctccatttgttggttattcagatactttttcgtttaatcatccggatggaaaatgtccaacatgcgatggcttaggaaagattaccgaaatcaatcttcatcagctagttgattatgacaaatcattaaacaaagggcctatcgatttccccacatttacagttggcaactggcggtggaagcgttatgcccatagtggtctatttgatttggataaaaaaatcaaggactattctcctgaagagttagcattatttttatatgctccacaacaaaaactagctaatccacccaaagagtggcctcatacagctttgtatgaaggaatcgtcccgcgtatgcaacgtagcatattgcatacagacgaaggcaaacgtcatcaaaaataccttaatcactttgttaccgtaaaaagatgtcctgattgtttaggaagtagagtcaatgaacgtgttcgtagctgcaaaattaatcagaaaagtattgctgatgctgttgacatgccactcactgaattacattcttttattcgttcaatggacctatccttaataaaaactattcaagaagagctacttgtacgtctagaagcattaattaatatcggtctctcctacctcacattaggacgagcaactgaaacactttctggtggtgaagcacagcggattaaaattgctaagtatgtaaacagcgccttaaatgatattatgtatattttagatgaaccaagtgctggcttacatccaaaggacatcgaacggatcagtcgtgcattgctcaatttaaaaaataaaggaaacaccgtggttctcgtggaacataatccacaattaattagagaagctgattttatcatcgatatcggacctttcgcaggcgaaaatggtggccatgtccagttttcaggaacgtatgacgcatttttagtctccaaaaccttgactagtcaagcgcttcaagagccgctccctttaaacgaccaaccaagaaaagcaaggaagtctttatcaatcgaacatgcgacactgcataatttaaacaatctatctgtcgaagttccgttaggagttttgactgttatttgtggggtcgctggttcaggtaaatcatcattagcggaagaaatttatcaaaaagcccaggctgataaccaagaaattattcatctttcacaaaaaagcattaccgcaaatttacgatccacacctatgacctatcttaatatttttgataaggtccgcaaactgtttgcggaagaaaatcatgttagtccagctttatttagctataattccaaaggcgcctgtcctacttgcaaggggaaaggcataattgtctccgatatgtcttttatggaggatgttactagtatttgcgaaacctgtcacggaacgcgttacaaagaagaggtgcttcattatctgtataacggaaaaaatatcgttgaagtactagctttaagcgttaaagatggctatgattttttcaaagaccagccttttgctctttcattaaaaaatttactggaagttggcttaagctatcttaaactcaatcaatcgctctcaacattatctggtggcgaattgcaaagggtaaaattagcagacacacttcaccaaaaaaaagctatctatttaatggatgaacctacagatggtttacacttaattgatatccaacaaagtcttcaacttttcaatcgaatggtagaagaaggaaacagcttgattttattagaacatcacattgatgtgattaaaagtgccgactggttgattgaactaggtcccgaaggtggaaaaaatggcggacagcttctttttacaggaaccccagcaaatatgctaaattccactcattctattactaaaggctatctgtaa

SEQ ID NO: 52 - DNA, 1662 bp, Enterococcus faecalis
atgaagaaattaaaaatgttaggatgcgtcgggttgcttttagctttaacggcttgtcaggcgggaacgggaaactcggctgatagtaacaaagcagcggaacaaaaaattgcaattagttctgaagcggctatttcgacaatggaaccacacacagcgggggatacgacctcgactttagtcatgaatcaagtttatgaaggactctatgttttaggtaaagaagatgaattagagttgggggtcgctgccgaagaaccagcgatttctgaagatgaaaccgtttatacatttaagattagagaagatgccaaatggtcgaatgatgatccagtaacagcaaacgactttgtttatgcatggcaacaagttgcttcccctaaatcaggatcgattcatcaagctttattttttgatgtcattaaaaatgctaaggaaattgctttagaaggcgcagatgtgaatactcttggggttaaggcgctagatgataaaacgttagaaataactttagaacggcccaccccttatttgaaatcattactttcgtttcctgttttgtttccacaaaatgaaaaatatatcaaagaacaaggggataaatatgctactgatgcagaacatttgatttataatggtccttttaaattgaaagaatgggataatgcctcttctgatgactggacctacgaaaaaaatgatacgtattgggatgctgaaaaagttaaattaacagaagcgaaagtttcagtaattaagagcccaacgacagcggtgaatttgtttgactcgaatgaattggatgtagtgaataagctaagtggtgaatttattcctggttatgttgataatccagcctttctttcaattcctcaattcgtcacatactttttaaaaatgaacagcgttcgtgatggaaaagaaaatccggctttagcgaacaacaatattcgtaaagcgttggcacaagcttttgataaagaaagttttgtaaaagaagtcttgcaagatcaatcaacggctacagatcaagtaattccgccgggacaaacgattgcgccagatggaacagatttcacaaaactagctgctaagaaaaataactacttaacctacgatacagcgaaagcaaaagaattctgggaaaaagggaaaaaagaaattgggctggataaaatcaaattagaatttttaacagatgatacagacagcgccaaaaaagctgctgagtttttccaatttcaattggaagaaaatctagatggattagaagtgaatgttactcaagttccttttactattcgtgttgatcgtgatcaaacgagagactatgatttagaattatctggttggggaaccgattatcgtgatccattaacagttatgcgcatctttacttcggatagtaccttgggcggcgtaacgttcaagagtgatacgtatgatcaattaattcaagaaactagaacaacacatgcggctgatcaagaggctcgtttaaatgactttgctcaagcacaagatattttggtgaatcaggaaacggttttagcaccaatctacaatcgaagcatttctgtattagctaatcaaaaaatcaaggatctgtattggcattcatttggacccacgtacagtttaaaatgggcttatgttaactaa

SEQ ID NO: 53 - DNA, 1878 bp, Enterococcus faecalis
atgaagcaattaaaaaaagtttggtacaccgttagtaccttgttactaattttgccacttttcacaagtgtattagggacaacaactgcatttgcagaagaaaatggggagagcgcacagctcgtgattcacaaaaagaaaatgacggatttaccagatccgcttattcaaaatagcgggaaagaaatgagcgagtttgataaatatcaaggactggcagatgtgacgtttagtatttataacgtgacgaacgaattttacgagcaacgagcggcaggcgcaagcgttgatgcagctaaacaagctgtccaaagtttaactcctgggaaacctgttgctcaaggaaccaccgatgcaaatgggaatgtcactgttcagttacctaaaaaacaaaatggtaaagatgcagtgtataccattaaagaagaaccaaaagagggtgtagttgctgctacgaatatggtggtggcgttcccagtttacgaaatgatcaagcaaacagatggttcctataaatatggaacagaagaattagcggttgttcatatttatcctaaaaatgtggtagccaatgatggtagtttgaaaaaagtaggaactgctgaaaatgaaggattaaatggcgcagaatttgttatttctaaaagcgaaggctcaccaggcacagtaaaatatatccaaggagtcaaagatggattatatacatggacaacggataaagaacaagcaaaacgctttattactgggaaaagttatgaaattggcgaaaatgatttcacagaagcagagaatggaacgggagaattaacagttaaaaatcttgaggttggttcgtatattttagaagaagtaaaagctccaaataatgcagaattaattgaaaatcaaacaaaaacaccatttacaattgaagcaaacaatcaaacacctgttgaaaaaacagtcaaaaatgatacctctaaagttgataaaacaacaccaagcttagatggtaaagatgtggcaattggcgaaaaaattaaatatcaaatttctgtaaatattccattggggattgcagacaaagaaggcgacgctaataaatacgtcaaattcaatttagttgataaacatgatgcagccttaacttttgataacgtgacttctggagagtatgcttatgcgttatatgatggggatacagtgattgctcctgaaaattatcaagtgactgaacaagcaaatggcttcactgtcgccgttaatccagcgtatattcctacgctaacaccaggcggcacactaaaattcgtttactttatgcatttaaatgaaaaagcagatcctacgaaaggctttaaaaatgaggcgaatgttgataacggtcataccgacgaccaaacaccaccaactgttgaagttgtgacaggtgggaaacgtttcattaaagtcgatggcgatgtgacagcgacacaagccttggcgggagcttcctttgtcgtccgtgatcaaaacagcgacacagcaaattatttgaaaatcgatgaaacaacgaaagcagcaacttgggtgaaaacaaaagctgaagcaactacttttacaacaacggctgatggattagttgatatcacagggcttaaatacggtacctattatttagaagaaactgtagctcctgatgattatgtcttgttaacaaatcggattgaatttgtggtcaatgaacaatcatatggcacaacagaaaacctagtttcaccagaaaaagtaccaaacaaacacaaaggtaccttaccttcaacaggtggcaaaggaatctacgtttacttaggaagtggcgcagtcttgctacttattgcaggagtctactttgctagacgtagaaaagaaaatgcttaa

SEQ ID NO: 54 - DNA, 483 bp, Enterococcus faecalis
atgaacatttttgctgtccgtttaaaagaggctttaacagccaagaacatcaaacctagtgatttagcgaaaaaaactggcatcggtaaatcttcgatcagcgattggctagctggtcgttacgaagcaaaacaagacaaagtttatcgcattgcagatgcattagacattaatgaggcctggttgatgggacaagaagttcccatggaaaaaaatgcctcaactatcgaccgcatttataaaaaattagaaccccaacgacaagccatcgtttatcaatttgccgaacaacaattacacgaacaacaaacgcaagcagaaattctctcattccctcgccgtgacgaaatgacactggctgcccacgctggggatccagaaaagatattttcaaaagaagagatcgagaaaattcacgattacttggatgaaattgatgccaaatatcaacaatcgatttcttctgacaaaaaagaggattaa

SEQ ID NO: 55 - DNA, 1620 bp, Enterococcus faecalis
atggcttatcagtttaaattaccggatatcggtgaagggattgccgaaggcgaaatcgttaaatggtttgtaaaacctggcgatacaatcaacgaagacgatacgttattagaagtacaaaatgacaaatcagtggaagaaattccatcaccagtaacaggtactgtaaaaaatatcgttgtaccagaaggaacagttgcaaacgttggtgacgtgttaatcgaaatcgacgcacctggtcacgaagataacgatgcagcaccagcagctcctgcacaagaacaaacaccagcacaacctgctgctgtaccaacaaccgaagcagctggcggatttttccaattcaaattaccagacatcggtgaaggaattgccgaaggcgaaatcgttaaatggttcgttaaagcgggcgacacaattaatgaagatgattcattattagaagtacaaaatgacaaatcagtagaagaaattccatcaccagtaacaggtactgtaaaaaatatcgttgtaccagaaggaacagttgccaatgtgggtgacgtgttagttgaaattgacgcacctggtcataattcagcagcaccgtcagtcgcagcaccagctactgacgctcctaaagcggaagcatcagctccagccgcttcaacaggcgtagttgcagccgctgatccaaacaaacgcgttttagcaatgccatctgttcgtcagtatgcgcgtgaaaaagacgttgatattacacaagtaactgcaactggtaaaggtggccgtgtcattaaagcggatattgatgcctttgtctctggtggttctcaagcagccccagctactgaagctgccgcaacagaagcagcacctaaagcggaagcagctgcacctaaagcagcgccaaaagcctttacttctgatttaggcgaaatggaaacacgtgaaaaaatgacaccaacacgtaaagcaattgctaaagcaatggttaacagcaaacacactgctcctcacgtaacattacatgatgaagtagaagtttctaaattatgggatcaccgtaagaaatttaaagatgttgctgctgcaaatggtacaaaattaacattcttaccatacgttgtaaaagcattgacttcaactgttcaaaaattcccaatcttgaatgcatcaatcgatgacgcagcacaagaaattgtttacaaaaattactttaacattggtatcgctactgatacagatcatggcttatatgtaccaaatgttaaaaatgctaatacgaagagcatgtttgctatcgctgatgaaatcaacgaaaaagcagcattggctatcgaaggtaaattaactgcacaagatatgcgtgatggtacaatcacaattagtaacattggttcagtcggtggcggctggtttacaccagtaatcaactaccctgaagttgctattttaggcgttggtacaattgcacaagaaccagttgttaatgcagacggcgaaatcgttgtgggacgcatgatgaaattatcattaagctttgaccaccgtatcgttgacggcgcaactgctcaaaaagcaatgaacaacattaaacgcttattagctgatccagaattactattaatggaaggatga

SEQ ID NO: 56 - DNA, 567 bp, Enterococcus faecalis
atggcaaaacgaattatcattatgaactttgatattgaaagtaaatcgtaccaagcattttccgaaataaaaaagatgcaggcagaaagacagcttaaaggtgagcaaatggcggttgttacgcatgttaatgatggccagcatcaatttaaaatcaatgattttatcgattttacaggcaacaatcatacatcaaaagatagcatgattgggatgctagtaggcatattaggtggtcctctgggcattctttttggctggtttgctggaagtatgtatggtgcaagcaaagacgccaaagaaattcaagaagcacaaacggtttttgaacatgtgattcaaaagattgatgaaggacaaacgggattgttattaattgcagaagaagaagacaaccgtccgctcaaccaattggttatgtttgacttaggtggcgaaatcacgcggcttgatttagaggaagtccaacaagaaattaacgatgcgaacgaagttgcaaatgaagcgaaacaatcgtggcaagcaaaaaaagaacaacacaaagaagcaacatcgaaagaagaataa

SEQ ID NO: 57 - DNA, 1125 bp, Enterococcus faecalis
atgagtaggaagcgaaaaatcagcttaattagtttagtcatcattttggtttttgtcacagtcggctcagcatactttgctgtagcgggtagctatttaaagaaaacaattgataaaggctatgttcccataaaaaatgattataatgaagcgcaaaataaagatagtcaatcgtttttgattatggggctagacaatacaattgaacggaaattaggcacaactaggactgatgctatgatggtgattaccgtgaataacaagacgaagaaaataacctatttaagtttgccacgggatagttttgttcaaattgatgcgaaaaattaccaagggatgcagcgaattgaagccgcctatacctacgatggaccaacagcttctgttaacacagttgagaaattattgaatattccaatcaatcattacgttgtgtttaactttttatcttttattaagttaattgatgcggttggcggcatagatgtcaatgtcaagcaggcgtttgatggtgtcaccaaagacgggccaggatccattcattttgatgcagggaaacagcatttagatggtacgaaagctttatcttatgcccgtgaaagacatagcgataacgatattatgcgtggattccgacaacaagaaattattcaagcagttgaagacaagttgaaatctggtcaatcaatcatgaaaataatggacattattgattcgttaaatggaaacattcaaactgatgtggattccaatgaattgactcatttagtcaaagaaggtttgacttggaccaattatgataaacaacagctttcttttgactggcgcacttttagtaatgaagggcgcagtatggttgaactatacccagatagtattgaaaatgtccgtcatcaattacgtgtgtctttaaatttagaaaagccagatgaacgagatcaagacggctatgtcttccatacgaacggtgaatttttatatcaaagtgattataccgttcaagatgaagcagctgaggaaaacgaaatgacttccatcaacggcaatacgtatattggtgttcctggtaatacacagaccggcccgttgccatcagttaaaacggaaaatggctttataaaataa

SEQ ID NO: 58 - DNA, 768 bp, Enterococcus faecalis
atgtcaaaaaaaccatcaggttaccaaaaaaaagttctcacggtgttgttggtatcgtttggctttggcgggttgttagcgcagttttcgccgatgaaatcaggtgggttttcaagttggtttgatgattcatatgtcaaagctagtgctgaatcaagtaaaacaaaagaaccagcaccagttaaaattgagaaaaaagtcaaacctttaagctatggacaacaggtcaatcaagaaattgaaaagaagcaatatgatggacatctggatttgccgttagaattgcagacagatgctaaatggaaagacaccgcatacggatttggcaatgtggataagccgaatacaatcgaaattaatggctgtgcgattgtatcgcttgcaatggttggttcatacatggatcaccaagaagttacccctctggatgtgttagcttgggcaaaaaatgacttctttatggaagggcaagggacggcgtggtctatttttagtgcatatgctgaaatgaaaggctataactgtcaagaaattggggatattgaaacagtggcagctttcttgaaggaaggtcatccagtcattatttctgtaaaaccgggctatttcactacaactggtcacattatggtgatgagtggtgtggatgaaaaaggcgatttctggattaatgatccaaacgattcagaagaaaagggccattcaaaacggacatttacagccgaagaagtgatgaatgaagcgttaaacttctgggcattttattag

SEQ ID NO: 59 - DNA, 792 bp, Enterococcus faecalis
atggacttacatttaaccgttgatctaaaaaaaacaaagacactcattgacttagccgatcaggcccacttaatcattgaacaaacaactaaattaccgaaaaaagaggcagcgattcttttcttgctaatagataaccaactagttgctttaggacttgctgaagaaaaagctacatataaagaagtttcttttgatcactcgattttattgaaaccgacttgggacacagaacttgcctatttagcgcaagctttcctagatgatgcgaaagaaagtggtttaacattggaagcaaccccaacgacagtcaaaattccgaaaagtgcggtagcgacagtgactaactataaagaaacagtcacctttatcttggaacgttttggctactctctgtttaaaaaaccggcgccgaagaaagccagaccagccaaagcacgccacaaatggacaaaagaagttagccaaattcctttttatattgatactcgacaaagcaaagcaactgttttttggcaaaagcgcaatgaaatgcttattaaagctggcgcgacaatgatgcccgaagcccctttaaataaagacgggtctgtcggtttctccgctagatttggtgaaaaacttcgtgatgaacgcaagggccaatttaaagactttgtcacaacggaagatatcgtcttaaaaagcgttaatgaagtcggcttgtttctctattttgctggaacaaacagctggttagagctagttgatgagaacggcaaaaccttaaatgaatggactgtggtggaataa

SEQ ID NO: 60 - DNA, 1077 bp, Enterococcus faecalis
atgaacagatggaaagtatatgcaacggtaatcgcttgtatgttatttggctggattggcgtggaggcgcacgcttctgaatttaattttgcggtcacaccaacaattcccgaaaatcaagtggataaatcaaaaacctactttgacttaaaaatggcgcctggtgccaaacaaaccgtagaaattcagttacgcaatgatacagatgaagacattaccattgaaaatacggtgaactcagcgacaacaaatttaaatggcgtagtagaatatggccaaaacgggatcaaacctgacaaaaccttacgttttaacttaaaagattatgtggaagcaccgaaagaaatcatcttgccgaagcattcccaaaagaccttacctttaaccattacgatgcctaaagattcttttgatggcgtgatggctggcggtataacactcaaagagaaaaagaaagaaacaacgacttctgcggatcaatcaaaagggttagctattaataatgaatactcctatgttgtggctattattcttcagcaaaatgagacaaaggttcaaccagatttaaaattactgggggttaaaccaggccaagtcaacgcgcgaaacgtcatcaatgtttctttacaaaacccacaagcggcctatttaaaccaattacatttaatcaacactgtttcaaaaggaggcgaaacgctttaccaatccgatactgaggatatgcaagtggcgccaaactctaactttagttacccaatttctttaaaaggggaacgattaacgccaggaaaatatgtcttgaaatcaacggcctatggtgtaaaagatgaaaagggcacctatcaagtcaaaggcgccaatggtgaagaacggtacctgtacaaatgggaatttacaaaagaatttactatttctggggacgtcgctaaagaattaaatgaaaaagacgtaaccattaaaggaaccaattggtggttgtatctactgattgcattaatcattctagcgctgctcttattgattttcttcttgtatcgtaaaaagaaaaaagaggaagaacaacaatctgagcaataa

SEQ ID NO: 61 - DNA, 975 bp, Enterococcus faecalis
atgagcaagaatttttgggcaacattgccaaagcccttttttgttttagcaccgatggaagatgtcactgatgtggtctttcgtcatgtcgtgaaagaagctggggcaccagatgtgttttttacagaatttactaattcggatagttattgtcatcctgaaggaaaagatagtgtacgcgggcgcctcgtttttacagaagatgaacagccgatggtggcacatatttggggggataaaccggaatttttccgtgaaatgagtatcggcgtagcggagatgggctttcaagggttagacataaatatgggctgtcctgtgcctaacgtggctgagcgtggaaaaggcagcgggctaattttgcgcccagaagtcgcggctgaattgattgacgctgccaaagcaggtggcttacctgttagtgtcaaaacacgcattgggtttactgaaatggcggaaatggaggcgtggatcacgcatttattagagcaagacattgcgaatctatccattcatttgcgaacacgaaaagagatgagcaaagtggatgcccattgggaggtcattccgcaaattatggctattcgggaccgtgtcgcaccgcaaacgacaattacgattaatggggatattcccgatcgtcaaaagggcctagaattagcagaacaatatggtgtagatggcatcatgattggtcgggggatttttaaaaatccttatgcctttgaaaaagaacccaaaacacatacgccacaagaattgctgggcttgctacgtttacaattggatttgcaagacaaatatgcggaattggtgcctcgctccatcgttgggctgcatcgcttctttaaaatttatgtcaaaggctttccaggtgccagtgatttaagagcacaattaatgaatacaaaatcaacggatgaagtgcgccagttgttagcgacgtttgaaacagaacatggtgtgcttgactaa

SEQ ID NO: 62 - DNA, 930 bp, Enterococcus faecalis
atgaaagtgaataaatttgttaaaggttttgcggcaattgcattatcaagtttagtattagcagcatgtggtgcagacaagaaagacaacacaacgaactcttctagcgcagcatcttcagaaacgaaaaaatcaacggaatcatcagcaccagcgaaaaaagttgccggtggcgatttaaaagatggtacgtataaattagaagaaaaaaatgaaaaaaatggttaccgtgcagtctttgaaatgactgtaaaagacggcaaaatcactgaatctaaatatgacaacatcaatgctgacggcaagtctaaaacagaagacactaagtatgaagaaagcatgaaagcaaaatctggtgttggaccaaaagaatacatcaaacaattaaacgattcttttgttaaagcacaaagcgcaagcggtgtggaagtagtaactggtgcgactcattcatctgaatcattccaaaactacgcacaacaattaatccaagcagcacaagctggtaacacagacacaatcgaaatcgacaatggggcaacattgaaagatggtacgtactcattgaaagaaaaaaatgactcaaacggctaccacacaacattctcaatgactgtgaaagatggtaaagtgactgaatctaactacgataacgtgaacgctgacggcaaatctaaaaaagatgacactgaatacgaaagcaaaatgaaagacgttgctggcgttggaccaaaagaatatatcgaaacattaaacaaagaatttgttaaagcaatgggcgaagaagacggatcacctgcaggtgttgaagtagtaactggtgcaacacacagcacacattcattcatcaactacgcacaacaattagtgaacgctgctgaaaaaggcgacacaactgaaatcgttgttgacaacatcgtaacaaaataa

SEQ ID NO: 63 - DNA, 861 bp, Enterococcus faecalis
atgatgaaaaaaaatctttttgctagtttatttagtgccacactactatttgggggaagtgaaatttctgcttttgcacaagaaattatccctgatgatactacgacaccgcccattgaagtaccaacagaaccaagtacaccagaaaagccaacagatccaacaccgccaattgagccacctgtagaccctgtagagccacctattacaccaacggagccaacagaaccgacagagccgacaacaccaacagaacctgaaaaaccagtagttccaacggaaccgacaacaccaacagaaccgacaactcctacagagccaagtgaaccagaacaaccaacggagccaagtaaaccagtagaacctgaaaaaccagttacaccaagcaaaccagcagaacccgaaaaacctgtgacaccaactaaaccaacagaacctgaaaaaccagtacaaccagcagaaccaagcaagccaatcgacgttgttgtaacgccaacaggggaattaaatcacgctggaaatggtacacaacagccaacagtccctattgaaacaagtaatttggcagaaatcacacacgtgccaagtgtaacaacacctattacaactacagacggagaaaacattgtagctgtagaaaaaggtgttccacttacacaaacagcagaagggttaaaacctattcaatcgagttacaaagtattgcctagcggaaatgtagaagtaaaaggtaaggacggtaaaatgaaggttttaccatacacaggtgaagaaatgaatatctttttatctgccgtaggcggtatcttgtctgtagtatctgggtttgtcatctttaaaaaacgcaaagctaaagtataa

SEQ ID NO: 64 - DNA, 1344 bp, Enterococcus faecalis
gtgcgtatgaataaaaaaacaccaaaaccattaaccccacccaaagccttttttaactggtgtactgcacaaatacccacgtatgaatggcaaaacaaaaaggagacaattcttgcgagttctcgcaagaattgccctatcataaaaaaacgattaacaaaatactcacgattatcgtttccaacgaaattttactcctttggaatcattctcgttcgtgcaaaacgaattgaaattcaaacccatagttattggcagacgattacagatggaatagaaaaccttatctatgagccgtcaaaccttgaacggttttcaaacgatacccatgttaaagcccattatgagaacggacattggcatgagggcttgttagcaaattatggttttatgagtagtgcttatacaaatacagtattctatccaaataactggcaagaaaaactaaccactgtatcggaattaaagtacttacagttacctgaaatagaacgtcaagaactagctcatatttacaaataccgaaacgaaattgagtttttacaaaagataggtgccacaaccttagcgaatgaaatcatttttgacgactatcgcaacgtttttggactgtattttcataaagtagatatgagagtaattactaagaaatggctaaaagcgaataaacaaaaattaaaaacaagaaatccaacctttcatgaattcatgttagaaaaaacgttaaaagagcgaaatgcgcctatgataaacgaaatagaaaagtacgtgcattattcgcaaattaagcaactaccgaaagaagtgaacttaacaaagtttcaaaaatggtttatacgaaaaggggagcgttttgactattatatggactatttacacatgttagaagagttgaacaccccacttaataacgatagtgtattgtatcctgaaaacttacaagtagctcacgataacgctatgaacacgctaaaccttttgaaaagtgagattgaagaaaagcagtatcaagaacggaaaaaccaaattaaagcgttagaagctgaaattgacgatttgctttttctcacaccacattcattacaagaaatcattcaagaaggaagtattctacgccattgtgtgggcagtcaacactatatcgaacggcatacgcaaggaaaaacaacgattgtttttatccgaagaaaagaaaagccagatatgccttacttcacattagaatatcgaaatcaacaggttatacaaatacaaggaaaatgtaaccgtcaggaagtaccagaaaagataaaacaagcagtcagacaatggcaagagaatttacagcacgccttatcatcataa

SEQ ID NO: 65 - protein, 871 aa, Enterococcus faecalis
MKNKSRQFLKNNWPYMLASFFIPFLIMAIIYLSIGIYPGSSRSVLASDAFSQFSNFHASFNNVLHGKQSLFYTWNASLGLNYLSLISYYLGGLFTPLVFFFNNQNMPDALYFLTLLKIGSAGLSFWFLAKQTFKIPKWSHVTLSVSYALMSFIVAHSELIMWLDAFIYLPLVILGIHRLMDQRKPTLLFVSYFLLFITNYYFGFMIGLFSFLYYFARTFTDWQRYKSRIVAYFTTSLLAGGASMIMVLPAVLDLRTNGETLSEITTFKTEATAFLDIIMKNMIGVYDTTKYGSIPFIYIGLLPLIFCLFYFVTKEVPLKNKLLFGSLFVLLIASFYITPLNLFWHGMHAPNMFLFRYSFLFSFLVILLAGYGWEKFEKDDLGVLSGLILILLAIFALAMGTKGATSYTYVTLTSFVLTATFLLLYFFGIAFYQLKKAPMQYLVILLLLLVSGEAIINTRAMVTGILDDWNYASRSLYSEPYPDLKNLVDQTKKENDTFYRLENLNGVSANDGINYGYSGISMFSSVRNRHSSTYLNALGFRSRGTNLNIRYQNNTLLMDALMGIKYNIAENNPMKFGFERQAAAGKYQLYRNENALPLGFLADKEIYNVRQPLNDNLGSQTNLLNALANTNERYFTFYQPTMTLQNNVTITQNTAGVTFTEKQHNVAKEISYTVNVPANTQAYLSLFPTDFAQLESSTATVTVNGSSQQSQIGITGQYYNLGYYPKDTTVNFKVSFYGTKAVSFVQPQVVGLNTNAFEKAISAVQEKGVDLTTGKRSASGTFTADKDQVLVTTIPYDKGWRVKIDGKKVTPKAFKDAFLSVPVSAGTHTIQFSYLPEGLIPGIVLFVLCTGGFVAYVTLIPARRNRKKEDK

SEQ ID NO: 66 - protein, 632 aa, Enterococcus faecalis
MGKYHELAEKIVKNVGGQENINSLTHCITRLRFKLKDESQANDDVLKNMDGVVTVMKSGGQYQVVIGNHVPAVYEEVVSIAGLSGEREEEASSGNLFDRLIDILSGCFQPFLGALAAAGMVKGLNALLVFLKLYTATSGTYTMLNGIGDAIFYFMPVILGYTAAKKFRLHPMVGIVIGAALCYPTIQGSALQTAFETTAGAGAAAPYNLFGLPAYNTFMGIPWVGANYTSSVVPIIFIIAFAAQVQKVFKRIIPEVVQTFLVPFFVLLIALPIGFLVIGPIVSMLTDLLSAGFTALMSFSPALYGLILGFFWQVLVIFGLHWSVVPLAIMQVTQEGSSQVLTGSFAASFAQTAVVLAMFFKLKDKKLKALCPPAIISGIFGVTEPAIYGITLPKKWPFIYSMIGGAVGGLYLMINNVTAYTMGGLGIFGVLNFINGDDASGMIQSFIAIAIAAVVGFGLTFFFWKDNTVEEEEVIIDKTTIKKENITSPVKGRVLSLKNAEDPAFANGALGNGVVIEPTEGKVVAPFDGTIVTLFPTKHALGLISDNGTELLIHIGIDTVQLEGEGFEAFVKQGDRVKKGQTLVTFDLEGIKKAGFSTQIPIVVTNTADYLDILEVGSNEVSTSDDLLTALI

SEQ ID NO: 67 - protein, 370 aa, Enterococcus faecalis
MPMIIKQEQFIPKDTVETTIDLLIRNLTTIKDNTGEFLLDFDGLKVDDKSWTIWNWPQGVGLYGIYKNYRNTKSEKALQVVNDWFEGRMQEGAPPKNVNTMAPLLTMAYLYEDTKDSKYIPYLEQWAEWVMEEMPRTNEGGLQHATYGPENKNQLWDDTLMMTVLPLAKIGKLLNRLDYLEEAKHQFLIHIKYLQDKKSGLWYHGWTFEGNHNYAEALWARGNCWITIAIPEIIEILELPKGDSLREFLLSTLNAQVAALAKYQDESGLWHTLINDSNSYLESSATAGFAYGILKAVHKKYISSEYEEVANKAIAGLLNEIDETGEVQHVSVGTGMGDNLDFYRTIGMTAMPYGQSLTILCLTELLVSYC

SEQ ID NO: 68 - protein, 595 aa, Enterococcus faecalis
MSAWQTFKNGTRQFFKDILQYLWLFFTLNVLLLLVGGAFSWATSNALKTQGIPYLSFNNLNLLLEKPLALVLLILLLLLFLGAVFYQFTFLLLGIFQIRQDHRFHFKGVTKASFKVLKKQGARSWLFFFGYFVVIVPFGNLIFQSNLLTKFVIPDFIVEFLSQRIPYLVGLLAFGLLVWYLAIRFIYTLPLMILERKKAGEAVKASWSMTNKRLWFIIRNIAFVTIAVFVSTYVIYVLLYLLQLKLDTLSDTISLLGGILNLTVVQFLQFVSNAWLSVLLINFLYTQLNVQAETTTKVAFDKETKRNKLVTIGMGLGLFTIFGGYIIFNAVYLTGLLESKPLIISHRGVTNSNGVQNTIPAMERTIKFKPDYIEIDVQETKDHQFVVMHDANLQELAGVDGTPQEFTLAELTKMTVKENGQEAPIASFDDYLAKANQAKQKLLVEIKTSKQDSQGALSNFIEKYERPLIKNNHQVQSLDYNVIKAFKKAKSKVKVSFILPYNFTFPETQADLYTMEATTLNDTFILKADQQKKAVYAWTVNDSEVLSKMLFMDVAGVITDDLELVNEEVNDFEKNPSYADRILHYIFMLPSVASQ

SEQ ID NO: 69 - protein, 359 aa, Enterococcus faecalis
MFLGFNEMKYSKGRYVLVVLVMVLIAWLIFILSGLANGLAQGNRLAVDQWQANQVVLSKEANSNLNVSVLDENVKETISGGKIAPIGQQSLAIRPADDKKAELTNVSLFGIEKESFLMPKVIEGNAFTDKNQVIASETLKNQGFKIGDKLTAGKYDEQLEIVGFISKSSYNIVPVIYTSLDTWRSIKYGDNPAMAKMVNGFIVRSKDNTEVKTTNKDSQVLSISDFIEKLPGYSAQNLTLDGMIYFLIVIAAFIIGIFIFVMTLQKTAMFGVLKVQGVPTSFLAKAVMLQTALLAVLGVAIGLALTGITVLFLPEAMPYATNGPRMILFSVLLILSALIGGAFSIRTIAKIDPLIAIGG

SEQ ID NO: 70 - protein, 270 aa, Enterococcus faecalis; identical to SEQ ID NO: 26

SEQ ID NO: 71 - protein, 745 aa, Enterococcus faecalis; identical to SEQ ID NO: 27

SEQ ID NO: 72 - protein, 553 aa, Enterococcus faecalis
MKKLKMLGCVGLLLALTACQAGTGNSADSNKAAEQKIAISSEAAISTMEPHTAGDTTSTLVMNQVYEGLYVLGKEDELELGVAAEEPAISEDETVYTFKIREDAKWSNDDPVTANDFVYAWQQVASPKSGSIHQALFFDVIKNAKEIALEGADVNTLGVKALDDKTLEITLERPTPYLKSLLSFPVLFPQNEKYIKEQGDKYATDAEHLIYNGPFKLKEWDNASSDDWTYEKNDTYWDAEKVKLTEAKVSVIKSPTTAVNLFDSNELDVVNKLSGEFIPGYVDNPAFLSIPQFVTYFLKMNSVRDGKENPALANNNIRKALAQAFDKESFVKEVLQDQSTATDQVIPPGQTIAPDGTDFTKLAAKKNNYLTYDTAKAKEFWEKGKKEIGLDKIKLEFLTDDTDSAKKAAEFFQFQLEENLDGLEVNVTQVPFTIRVDRDQTRDYDLELSGWGTDYRDPLTVMRIFTSDSTLGGVTFKSDTYDQLIQETRTTHAADQEARLNDFAQAQDILVNQETVLAPIYNRSISVLANQKIKDLYWHSFGPTYSLKWAYVN

SEQ ID NO: 73 - protein, 625 aa, Enterococcus faecalis
MKQLKKVWYTVSTLLLILPLFTSVLGTTTAFAEENGESAQLVIHKKKMTDLPDPLIQNSGKEMSEFDKYQGLADVTFSIYNVTNEFYEQRAAGASVDAAKQAVQSLTPGKPVAQGTTDANGNVTVQLPKKQNGKDAVYTIKEEPKEGVVAATNMVVAFPVYEMIKQTDGSYKYGTEELAVVHIYPKNVVANDGSLKKVGTAENEGLNGAEFVISKSEGSPGTVKYIQGVKDGLYTWTTDKEQAKRFITGKSYEIGENDFTEAENGTGELTVKNLEVGSYILEEVKAPNNAELIENQTKTPFTIEANNQTPVEKTVKNDTSKVDKTTPSLDGKDVAIGEKIKYQISVNIPLGIADKEGDANKYVKFNLVDKHDAALTFDNVTSGEYAYALYDGDTVIAPENYQVTEQANGFTVAVNPAYIPTLTPGGTLKFVYFMHLNEKADPTKGFKNEANVDNGHTDDQTPPTVEVVTGGKRFIKVDGDVTATQALAGASFVVRDQNSDTANYLKIDETTKAATWVKTKAEATTFTTTADGLVDITGLKYGTYYLEETVAPDDYVLLTNRIEFVVNEQSYGTTENLVSPEKVPNKHKGTLPSTGGKGIYVYLGSGAVLLLIAGVYFARRRKENA

SEQ ID NO: 74 - protein, 160 aa, Enterococcus faecalis; identical to SEQ ID NO: 30

SEQ ID NO: 75 - protein, 539 aa, Enterococcus faecalis; identical to SEQ ID NO: 31

SEQ ID NO: 76 - protein, 188 aa, Enterococcus faecalis; identical to SEQ ID NO: 32

SEQ ID NO: 77 - protein, 374 aa, Enterococcus faecalis
MSRKRKISLISLVIILVFVTVGSAYFAVAGSYLKKTIDKGYVPIKNDYNEAQNKDSQSFLIMGLDNTIERKLGTTRTDAMMVITVNNKTKKITYLSLPRDSFVQIDAKNYQGMQRIEAAYTYDGPTASVNTVEKLLNIPINHYVVFNFLSFIKLIDAVGGIDVNVKQAFDGVTKDGPGSIHFDAGKQHLDGTKALSYARERHSDNDIMRGFRQQEIIQAVEDKLKSGQSIMKIMDIIDSLNGNIQTDVDSNELTHLVKEGLTWTNYDKQQLSFDWRTFSNEGRSMVELYPDSIENVRHQLRVSLNLEKPDERDQDGYVFHTNGEFLYQSDYTVQDEAAEENEMTSINGNTYIGVPGNTQTGPLPSVKTENGFIK

SEQ ID NO: 78 - protein, 255 aa, Enterococcus faecalis
MSKKPSGYQKKVLTVLLVSFGFGGLLAQFSPMKSGGFSSWFDDSYVKASAESSKTKEPAPVKIEKKVKPLSYGQQVNQEIEKKQYDGHLDLPLELQTDAKWKDTAYGFGNVDKPNTIEINGCAIVSLAMVGSYMDHQEVTPLDVLAWAKNDFFMEGQGTAWSIFSAYAEMKGYNCQEIGDIETVAAFLKEGHPVIISVKPGYFTTTGHIMVMSGVDEKGDFWINDPNDSEEKGHSKRTFTAEEVMNEALNFWAFY

SEQ ID NO: 79 - protein, 263 aa, Enterococcus faecalis; identical to SEQ ID NO: 35

SEQ ID NO: 80 - protein, 358 aa, Enterococcus faecalis
MNRWKVYATVIACMLFGWIGVEAHASEFNFAVTPTIPENQVDKSKTYFDLKMAPGAKQTVEIQLRNDTDEDITIENTVNSATTNLNGVVEYGQNGIKPDKTLRFNLKDYVEAPKEIILPKHSQKTLPLTITMPKDSFDGVMAGGITLKEKKKETTTSADQSKGLAINNEYSYVVAIILQQNETKVQPDLKLLGVKPGQVNARNVINVSLQNPQAAYLNQLHLINTVSKGGETLYQSDTEDMQVAPNSNFSYPISLKGERLTPGKYVLKSTAYGVKDEKGTYQVKGANGEERYLYKWEFTKEFTISGDVAKELNEKDVTIKGTNWWLYLLIALIILALLLLIFFLYRKKKKEEEQQSEQ

SEQ ID NO: 81 - protein, 324 aa, Enterococcus faecalis; identical to SEQ ID NO: 42

SEQ ID NO: 82 - protein, 309 aa, Enterococcus faecalis
MKVNKFVKGFAAIALSSLVLAACGADKKDNTTNSSSAASSETKKSTESSAPAKKVAGGDLKDGTYKLEEKNEKNGYRAVFEMTVKDGKITESKYDNINADGKSKTEDTKYEESMKAKSGVGPKEYIKQLNDSFVKAQSASGVEVVTGATHSSESFQNYAQQLIQAAQAGNTDTIEIDNGATLKDGTYSLKEKNDSNGYHTTFSMTVKDGKVTESNYDNVNADGKSKKDDTEYESKMKDVAGVGPKEYIETLNKEFVKAMGEEDGSPAGVEVVTGATHSTHSFINYAQQLVNAAEKGDTTEIVVDNIVTK

SEQ ID NO: 83 - protein, 286 aa, Enterococcus faecalis
MMKKNLFASLFSATLLFGGSEISAFAQEIIPDDTTTPPIEVPTEPSTPEKPTDPTPPIEPPVDPVEPPITPTEPTEPTEPTTPTEPEKPVVPTEPTTPTEPTTPTEPSEPEQPTEPSKPVEPEKPVTPSKPAEPEKPVTPTKPTEPEKPVQPAEPSKPIDVVVTPTGELNHAGNGTQQPTVPIETSNLAEITHVPSVTTPITTTDGENIVAVEKGVPLTQTAEGLKPIQSSYKVLPSGNVEVKGKDGKMKVLPYTGEEMNIFLSAVGGILSVVSGFVIFKKRKAKV

SEQ ID NO: 84 - protein, 447 aa, Enterococcus faecalis
MRMNKKTPKPLTPPKAFFNWCTAQIPTYEWQNKKETILASSRKNCPIIKKRLTKYSRLSFPTKFYSFGIILVRAKRIEIQTHSYWQTITDGIENLIYEPSNLERFSNDTHVKAHYENGHWHEGLLANYGFMSSAYTNTVFYPNNWQEKLTTVSELKYLQLPEIERQELAHIYKYRNEIEFLQKIGATTLANEIIFDDYRNVFGLYFHKVDMRVITKKWLKANKQKLKTRNPTFHEFMLEKTLKERNAPMINEIEKYVHYSQIKQLPKEVNLTKFQKWFIRKGERFDYYMDYLHMLEELNTPLNNDSVLYPENLQVAHDNAMNTLNLLKSEIEEKQYQERKNQIKALEAEIDDLLFLTPHSLQEIIQEGSILRHCVGSQHYIERHTQGKTTIVFIRRKEKPDMPYFTLEYRNQQVIQIQGKCNRQEVPEKIKQAVRQWQENLQHALSS

SEQ ID NO: 85 - DNA, 1694 bp, Enterococcus faecalis
atgaaaaataaaagtaggcagtttttaaaaaacaactggccttatatgttagccagtttcttcattccatttttaattatggcaattatctatttgagtattgggatttatccaggaagtagtcgcagtgttttagccagcgatgccttttctcaattttcaaattttcacgcaagctttaacaatgttcttcatggaaaacaaagtcttttctatacgtggaatgcttctttgggactaaactacttgtccttaatttcctattatcttggtggcttatttacgccgctcgtctttttctttaacaatcaaaacatgcctgatgcgctctatttcctaacgttgttgaaaattgggagtgctggcttgagtttttggttcttggcaaaacaaacctttaagattcctaaatggtcccatgtgactttaagtgtgtcttatgcgctaatgtccttcattgtggcccattcagaattaattatgtggctggatgcctttatttatctgccactcgtaattttaggaattcatcgtttaatggaccaacgaaaaccgacattattgtttgtcagttatttcttgcttttcattacaaattattattttggctttatgattgggttgttttccttcctgtactattttgcacgaacgtttacagactggcaacgatataaatctcgaatcgttgcgtattttactacttctcttttagctggtggagcatccatgattatggtcttacctgctgtcttagatttacgaaacaatggtgaaactctttctgaaattacaacctttaaaacagaagcgactgcctttttagatattattatgaaaaatatgattggcgtttacgatacaaccaaatatgggtccattccttttatttacattgggttgttgcctttgattttttgtctcttctatttcgttacgaaagaaattccattgaaaaacaaactactttttggcagtttgtttgtcctattgattgctagcttttacatcacgcccttaaatttattctggcacggtatgcatgcgccgaacatgtttcttttccgctatagtttcctcttttcattcctagttattttgcttgctggttatggttgggaaaaatttgaaaaggatgatctcggcgtcttaagcggcttgattttgattcttttagcaatttttgctcttgcaatgggcacaaaaggtgctactagttatacgtatgtgactttaacctctttcgtattaacggcaacttttttactattatactttttcgggattgctttttatcaattgaaaaaagcgcctatgcaatacttagtgattttactattgctgctcgtttctggtgaagcaatcattaatacacgagcgatggtcactggtattttagatgattggaactacgcatcacgcagcttgtattctgagccttaccctgacttaaaaaatctagtcgatcaaacaaaaaaagaaaatgataccttttatcgcttggaaaatttaaatggtgtttcggccaatgacggcattaactatggctacagtggcattagcatgttttcttccgtacggaaccgacattcttcaacatacctaaacgccttaggtttccgctcgcgaggcacgaatttaaatattcgttaccaaaataataccttgttaatggatgctttgatgggcattaa

SEQ ID NO: 86 - protein, 564 aa, Enterococcus faecalis
MKNKSRQFLKNNWPYMLASFFIPFLIMAIIYLSIGIYPGSSRSVLASDAFSQFSNFHASFNNVLHGKQSLFYTWNASLGLNYLSLISYYLGGLFTPLVFFFNNQNMPDALYFLTLLKIGSAGLSFWFLAKQTFKIPKWSHVTLSVSYALMSFIVAHSELIMWLDAFIYLPLVILGIHRLMDQRKPTLLFVSYFLLFITNYYFGFMIGLFSFLYYFARTFTDWQRYKSRIVAYFTTSLLAGGASMIMVLPAVLDLRNNGETLSEITTFKTEATAFLDIIMKNMIGVYDTTKYGSIPFIYIGLLPLIFCLFYFVTKEIPLKNKLLFGSLFVLLIASFYITPLNLFWHGMHAPNMFLFRYSFLFSFLVILLAGYGWEKFEKDDLGVLSGLILILLAIFALAMGTKGATSYTYVTLTSFVLTATFLLLYFFGIAFYQLKKAPMQYLVILLLLLVSGEAIINTRAMVTGILDDWNYASRSLYSEPYPDLKNLVDQTKKENDTFYRLENLNGVSANDGINYGYSGISMFSSVRNRHSSTYLNALGFRSRGTNLNIRYQNNTLLMDALMGI

SEQ ID NO: 87 - DNA, 1694 bp, Enterococcus faecalis
atgaaaaataaaagtaggcagtttttaaaaaacaactggccttatatgttagccagtttcttcattccatttttaattatggcaattatctatttgagtattgggatttatccaggaagtagtcgcagtgttttagccagcgatgccttttctcaattttcaaattttcacgcaagctttaacaatgttcttcatggaaaacaaagtcttttctatacgtggaatgcttctttgggactaaactacttgtccttaatttcctattatcttggtggcttatttacgccgctcgtctttttctttaacaatcaaaacatgcctgatgcgctctatttcctaacgttgttgaaaattgggagtgccggcttgagtttttggttcttggcaaaacaaacctttaagattcctaaatggtcccatgtgactttaagtgtgtcttatgcgctaatgtccttcattgtggcccattcagaattaattatgtggttggatgcctttatttatctgccactcgtaattttaggaattcatcgtttaatggaccaacgaaaaccgacattattgtttgtcagttatttcttgcttttcattacaaattattattttggctttatgattgggttgttttccttcctgtactattttgcacgaacgtttacaaactggcaacgatataaatctcgaatcgttgcgtattttactacttctcttttagctggtggagcatccatgattatggtcttacctgctgtcttagatttacgaaccaatggtgaaactctttctgaaattacaacctttaaaacagaagcgactgcctttttagatattattatgaaaaatatgattggcgtttacgatacaaccaaatatgggtctattccttttatttacattgggttgttgcctttgattttttgtctcttctatttcgttacgaaagaaattccattgaaaaacaaactactttttggcagtttgtttgtcctattgattgctagcttttacatcacgcccttaaatttattctggcacggtatgcatgcgccgaacatgtttcttttccgctatagtttcctcttttcattcctagttattttgcttgctggttatggttgggaaaaatttgaaaaggatgatctcggcgtcttaagcggcttgattttgattcttttagcaatttttgctcttgcaatgggcacaaaaggtgctactagttatacgtatgtgactttaacctctttcgtattaacggcaacttttttactattatactttttcgggattgctttttatcaattgaaaaaagcgcctacgcctatgcaatacttagtgattttactattgctgctcgtttctggtgaagcaatcattaatacacgggcgatggtcactggtattttagatgattggaactacgcatcacgcagcttgtattctgaaccttatcctgacttaaaaaatctagtcgatcaaacaaaaaaagaaaatgataccttttaccgcttggaaaatttaaatggtgtttcggccaatgacggcattaactatggctacagtggcattagcatgttttcttccgtgcggaaccgacattcttcaacatacctaaacgccttaggtttccgctcgcgaggcacgaatttaaatattcgttaccaaaataataccttgttaatggatgctttgatggg

SEQ ID NO: 88 - protein, 565 aa, Enterococcus faecalis
MKNKSRQFLKNNWPYMLASFFIPFLIMAIIYLSIGIYPGSSRSVLASDAFSQFSNFHASFNNVLHGKQSLFYTWNASLGLNYLSLISYYLGGLFTPLVFFFNNQNMPDALYFLTLLKIGSAGLSFWFLAKQTFKIPKWSHVTLSVSYALMSFIVAHSELIMWLDAFIYLPLVILGIHRLMDQRKPTLLFVSYFLLFITNYYFGFMIGLFSFLYYFARTFTNWQRYKSRIVAYFTTSLLAGGASMIMVLPAVLDLRTNGETLSEITTFKTEATAFLDIIMKNMIGVYDTTKYGSIPFIYIGLLPLIFCLFYFVTKEIPLKNKLLFGSLFVLLIASFYITPLNLFWHGMHAPNMFLFRYSFLFSFLVILLAGYGWEKFEKDDLGVLSGLILILLAIFALAMGTKGATSYTYVTLTSFVLTATFLLLYFFGIAFYQLKKAPTPMQYLVILLLLLVSGEAIINTRAMVTGILDDWNYASRSLYSEPYPDLKNLVDQTKKENDTFYRLENLNGVSANDGINYGYSGISMFSSVRNRHSSTYLNALGFRSRGTNLNIRYQNNTLLMDALMG

SEQ ID NO: 89 - DNA, 2315 bp, Enterococcus faecalis
atgaaaaataaaagtaggcagtttttaaaaaacaactggccttatatgttagccagtttcttcattccatttttaattatggcaattatctatttgagtattgggatttatccaggaagtagtcgcagtgttttagccagcgatgccttttctcaattttcaaattttcacgcaagctttaacaatgttcttcatggaaaacaaagtcttttctatacgtggaatgcttctttgggactaaactacttgtccttaatttcctattatcttggtggcttatttacgccgctcgtctttttctttaacaatcaaaacatgcctgatgcgctctatttcctaacgttgttgaaaattgggagtgctggcttgagtttttggttcttggcaaaacaaacctttaagattcctaaatggtcccatgtgactttaagtgtgtcttatgcgctaatgtccttcattgtggcccattcagaattaattatgtggttggatgcctttatttatctgccactcgtaattttaggaattcatcgtttaatggaccaacgaaaaccgacattattgtttgtcagttatttcttgcttttcattacaaattattattttggctttatgattgggttgttttccttcctgtactattttgcacgaacgtttacagactggcaacgatataaatctcgaatcgttgcgtattttactacttctcttttagctggtggagcatccatgattatggtcttacctgctgtcttagatttacgaaccaatggtgaaactctttctgaaattacaacctttaaaacagaagcgactgcctttttagatattattatgaaaaatatgattggcgtttacgatacaaccaaatatgggtccattccttttatttacattgggttgttgcctttgattttttgtctcttctatttcgttacgaaagaagttccattgaaaaacaaactactttttggcagtttgtttgtcctattgattgctagcttttacatcacgcccttaaatttattctggcacggtatgcatgcgccgaacatgtttcttttccgctatagtttcctcttttcattcctagttattttgcttgctggttatggttgggaaaaatttgaaaaggatgatctcggcgtcttaagcggcttgattttgattcttttagcaatttttgctcttgcaatgggcacaaaaggtgctactagttatacgtatgtgactttaacctctttcgtattaacggcaacttttttactattatactttttcgggattgctttttatcaattgaaaaaagcgcctatgcaatacttagtgattttactattgctgctcgtttctggtgaagcaatcattaatacacgggcgatggtcactggtattttagatgattggaactacgcatcacgcagcttgtattctgaaccttatcctgacttaaaaaatctagtcgatcaaacaaaaaaagaaaatgataccttttaccgcttggaaaatttaaatggtgtttcggccaatgacggcattaactatggctacagtggcattagcatgttttcttccgtgcggaaccgacattcttcaacgtacctaaacgccttaggtttccgctcgcgaggcacgaatttaaatattcgttaccaaaataataccttgttaatggatgctttgatgggcattaaatacaatattgctgaaaacaatccaatgaaattcggctttgagcgacaagcagctgctggtaaatatcagctttatcgtaacgaaaatgctttgccgttaggatttttagcagacaaagagatttacaatgtccggcaacctctcaatgataatttaggtagtcaaacaaatttactaaatgctttagccaataccaatgaacggtattttaccttttatcaaccaacgatgacgcttcaaaataacgtgacaattacgcaaaatacagctggcgtaacttttacggagaaacaacataacgtagccaaagagatttcttatacagtcaatgtgcccgccaatacgcaagcttatttgagtttattcccaacggattttgctcaattggaaagttccactgcgacggtcaccgtgaacggctcaagtcagcaatcacaaattggcattactggccaatattataatttaggctactatccaaaagatacaactgttaacttcaaagtaagtttttatggaaccaaagcagtaagttttgttcagccgcaagtagttggcttaaataccaatgcatttgaaaaagccatttccgccgtgcaagaaaaaggcgttgatttaac

SEQ ID NO: 90 - protein, 772 aa, Enterococcus faecalis
MKNKSRQFLKNNWPYMLASFFIPFLIMAIIYLSIGIYPGSSRSVLASDAFSQFSNFHASFNNVLHGKQSLFYTWNASLGLNYLSLISYYLGGLFTPLVFFFNNQNMPDALYFLTLLKIGSAGLSFWFLAKQTFKIPKWSHVTLSVSYALMSFIVAHSELIMWLDAFIYLPLVILGIHRLMDQRKPTLLFVSYFLLFITNYYFGFMIGLFSFLYYFARTFTDWQRYKSRIVAYFTTSLLAGGASMIMVLPAVLDLRTNGETLSEITTFKTEATAFLDIIMKNMIGVYDTTKYGSIPFIYIGLLPLIFCLFYFVTKEVPLKNKLLFGSLFVLLIASFYITPLNLFWHGMHAPNMFLFRYSFLFSFLVILLAGYGWEKFEKDDLGVLSGLILILLAIFALAMGTKGATSYTYVTLTSFVLTATFLLLYFFGIAFYQLKKAPMQYLVILLLLLVSGEAIINTRAMVTGILDDWNYASRSLYSEPYPDLKNLVDQTKKENDTFYRLENLNGVSANDGINYGYSGISMFSSVRNRHSSTYLNALGFRSRGTNLNIRYQNNTLLMDALMGIKYNIAENNPMKFGFERQAAAGKYQLYRNENALPLGFLADKEIYNVRQPLNDNLGSQTNLLNALANTNERYFTFYQPTMTLQNNVTITQNTAGVTFTEKQHNVAKEISYTVNVPANTQAYLSLFPTDFAQLESSTATVTVNGSSQQSQIGITGQYYNLGYYPKDTTVNFKVSFYGTKAVSFVQPQVVGLNTNAFEKAISAVQEKGVDLT

SEQ ID NO: 91 - DNA, 1722 bp, Enterococcus faecalis
atgaaaaataaaagtaggcagtttttaaaaaacaactggccttatatgttagccagtttcttcattccatttttaattatggcaattatctatttgagtattgggatttatccaggaagtagtcgcagtgttttagccagcgatgccttttctcaattttcaaattttcacgcaagctttaacaatgttcttcatggaaaacaaagtcttttctatacgtggaatgcttctttgggactaaactacttgtccttaatttcctattatcttggtggcttatttacgccgctcgtctttttctttaacaatcaaaacatgcctgatgcgctctatttcctaacgttgttgaaaattgggagtgctggcttgagtttttggttcttggcaaaacaaacctttaagattcctaaatggtcccatgtgactttaagtgtgtcttatgcgctaatgtccttcattgtggcccattcagaattaattatgtggctggatgcctttatttatctgccactcgtaattttaggaattcatcgtttaatggaccaacgaaaaccgacattattgtttgtcagttatttcttgcttttcattacaaattattattttggctttatgattgggttgttttccttcctgtactattttgcacgaacgtttacagactggcaacgatataaatctcgaatcgttgcgtattttactacttctcttttagctggtggaggatccatgattatggtcttacctgctgtcttagatttacgaacgaatggtgaaactctttctgaaattacaacctttaaaacagaagcgactgcctttttagatattattatgaaaaatatgattggcgtttacgatacaaccaaatatgggtccattccttttatttacattgggttgttgcctttgattttttgtctcttctatttcgttacgaaagaagttccattgaaaaacaaactactttttggcagtttgtttgtcctattgattgctagcttttacatcacgcccttaaatttattctggcacggcatgcatgcgccgaacatgtttctttttcgctatagtttcctcttttcattcctagttattttgcttgctggttatggttgggagaaatttgaaaaggatgatctcggcgtcttaagcggcttgattttgattcttttagcaatttttgctcttgcaatgggcacaaaaggtgctactagttatacgtatgtgactttaacctctttcgtattaacggcaacttttttactattatactttttcgggattgctttttatcaattgaaaaaagcgcctatgcaatacttagtgattttgttgttgctgctcgtttctggtgaagcaatcattaatacacgagcgatggtcactggtattttagatgattggaactacgcatcacgcagcttgtattctgagccttatcctgacttaaaaaatctagtcgatcaaacaaaaaaagaaaatgataccttttaccgcttggaaaatttaaatggtgtttcggccaatgacggcattaactatggctacagtggcattagcatgttttcttccgtacggaaccgacattcttcaacgtacctaaacgccttaggtttccgctcgcgaggcacgaatttaaatattcgttaccaaaataataccttgttaatggatgctttgatgggcattaaatacaatattgctgaaaacaatccaatg

SEQ ID NO: 92 - protein, 574 aa, Enterococcus faecalis
MKNKSRQFLKNNWPYMLASFFIPFLIMAIIYLSIGIYPGSSRSVLASDAFSQFSNFHASFNNVLHGKQSLFYTWNASLGLNYLSLISYYLGGLFTPLVFFFNNQNMPDALYFLTLLKIGSAGLSFWFLAKQTFKIPKWSHVTLSVSYALMSFIVAHSELIMWLDAFIYLPLVILGIHRLMDQRKPTLLFVSYFLLFITNYYFGFMIGLFSFLYYFARTFTDWQRYKSRIVAYFTTSLLAGGGSMIMVLPAVLDLRTNGETLSEITTFKTEATAFLDIIMKNMIGVYDTTKYGSIPFIYIGLLPLIFCLFYFVTKEVPLKNKLLFGSLFVLLIASFYITPLNLFWHGMHAPNMFLFRYSFLFSFLVILLAGYGWEKFEKDDLGVLSGLILILLAIFALAMGTKGATSYTYVTLTSFVLTATFLLLYFFGIAFYQLKKAPMQYLVILLLLLVSGEAIINTRAMVTGILDDWNYASRSLYSEPYPDLKNLVDQTKKENDTFYRLENLNGVSANDGINYGYSGISMFSSVRNRHSSTYLNALGFRSRGTNLNIRYQNNTLLMDALMGIKYNIAENNPM

SEQ ID NO: 93 - DNA, 2616 bp, Enterococcus faecalis
atgaaaaataaaagtaggcagtttttaaaaaacaactggccttatatgttagccagtttcttcattccatttttaattatggcaattatctatttgagtattgggatttatccaggaagtagtcgcagtgttttagccagcgatgccttttctcaattttcaaattttcacgcaagctttaacaatgttcttcatggaaaacaaagtcttttctatacgtggaatgcttctttgggactaaactacttgtccttaatttcctattatcttggtggcttatttacgccgctcgtctttttctttaacaatcaaaacatgcctgatgcgctctatttcctaacgttgttgaaaattgggagtgctggcttgagtttttggttcttggcaaaacaaacctttaagattcctaaatggtcccatgtgactttaagtgtgtcttatgcgctaatgtccttcattgtggcccattcagaattaattatgtggctggatgcctttatttatctgccactcgtaattttaggaattcatcgtttaatggaccaacgaaaaccgacattattgtttgtcagttatttcttgcttttcattacaaattattattttggctttatgattgggttgttttccttcctgtactattttgcacgaacgtttacagactggcaacgatataaatctcgaatcgttgcgtattttactacttctcttttagctggtggagcatccatgattatggtcttacctgctgtcttagatttacgaaccaatggtgaaactctttctgaaattacaacctttaaaacagaagcgactgcctttttagatattattatgaaaaatatgattggcgtttacgatacaaccaaatatgggtccattccttttatttacattgggttgttgcctttgattttttgtctcttctatttcgttacgaaagaagttccattgaaaaacaaactactttttggcagtttgtttgtcctattgattgctagcttttacatcacgcccttaaatttattctggcacggtatgcatgcgccgaacatgtttcttttccgctatagtttcctcttttcattcctagttattttgcttgctggttatggttgggaaaaatttgaaaaggatgatctcggcgtcttaagcggcttgattttgattcttttagcaatttttgctcttgcaatgggcacaaaaggtgctactagttatacgtatgtgactttaacctctttcgtattaacggcaacttttttactattatactttttcgggattgctttttatcaattgaaaaaagcgcctatgcaatacttagtgattttgttgttgctgctcgtttctggtgaagcaatcattaatacacgagcgatggtcactggtattttagatgattggaactacgcatcacgcagcttgtattctgagccttatcctgacttaaaaaatctagtcgatcaaacaaaaaaagaaaatgataccttttaccgcttggaaaatttaaatggtgtttcggccaatgacggcattaactatggctacagtggcattagcatgttttcttccgtacggaaccgacattcttcaacatacctaaacgccttaggtttccgctcgcgaggcacgaatttaaatattcgttaccaaaataataccttgttaatggatgctttgatgggcattaaatacaatattgctgaaaacaatccaatgaaattcggctttgagcgacaagcagctgctggtaaatatcagctttatcgtaacgaaaatgctttgccgttaggatttttagcagacaaagagatttacaatgtccggcaacctctcaatgataatttaggtagtcaaacaaatttactaaatgctttagccaataccaatgaacggtattttaccttttatcaaccaacgatgacgcttcaaaataacgtgacaattacgcaaaatacagctggcgtaacttttacggagaaacaacataacgtagccaaagagatttcttatacagtcaatgtgcccgccaatacgcaagcttatttgagtttattcccaacggattttgctcaattggaaagttccactgcgacggtcaccgtgaacggctcaagtcagcaatcacaaattggcattactggccaatattataatttaggctactatccaaaagatacaactgttaacttcaaagtaagtttttatggaaccaaagcagtaagttttgttcagccgcaagtagttggcttaaataccaatgcatttgaaaaagccatttccgccgtgcaagaaaaaggcgttgatttaaccactggcaaacgctctgcttcaggtacctttaccgccgacaaagatcaagtactcgtcactacaattccttatgacaaaggttggcgtgtcaaaattgatggcaaaaaagttaccccaaaagcatttaaagatgcctttctaagcgttcctgtcagcgctggaacccatactattcagttctcttatttaccagaaggattgattcctggcatcgtgttattcgttctatgtactggtggtttcgttgcctacgtaaccttgattcctgctagacgaaaccgtaaaaaagaagacaaataa

SEQ ID NO: 94 - protein, 871 aa, Enterococcus faecalis; identical to SEQ ID NO: 65

SEQ ID NO: 95 - DNA, 1929 bp, Enterococcus faecalis
atgaaaaataaaagtaggcagtttttaaaaaacaactggccttatatgttagccagtttcttcattccatttttaattatggcaattatctatttgagtattgggatttatccaggaagtagtcgcagtgttttagccagcgatgccttttctcaattttcaaattttcacgcaagctttaacaatgttcttcatggaaaacaaagtcttttctatacgtggaatgcttctttgggactaaactacttgtccttaatttcctattatcttggtggcttatttacgccgctcgtctttttctttaacaatcaaaacatgcctgatgcgctctatttcctaacgttattgaaaattgggagtgctggcttgagtttttggttcttggcaaaacaaacctttaagattcctaaatggtcccatgtgactttaagtgtgtcttatgcgctaatgtccttcattgtggcccattcagaattaattatgtggctggatgcctttatttatctgccactcgtaattttaggaattcatcgtttaatggaccaacgaaaaccgacattattgtttgtcagttatttcttgcttttcattacaaattattattttggctttatgattgggttgttttccttcctgtactattttgcacgaacgtttacagactggcaacgatataaatctcgaatcgttgcatattttactacttctcttttagctggtggagcatccatgattatggtcttacctgctgtcttagatttacgaaccaatggtgaaactctttctgaaattacaacctttaaaacagaagcgactgcctttttagatattattatgaaaaatatgattggcgtttacgatacaaccaaatatgggtccattccttttatttacattgggttgttgcctttgattttttgtctcttctatttcgttacgaaagaaattccattgaaaaacaaactactttttggcagtttgtttgtcctattgattgctagcttttacatcacgcccttaaatttattctggcacggtatgcatgcgccgaacatgtttcttttccgctatagtttcctcttttcattcctagttattttgcttgctggttatggttgggaaaaatttgaaaaggatgatctcggcgtcttaagcggcttgattttgattcttttagcaatttttgctcttgcaatgggcacaaaaggtgctactagttatacgtatgtgactttaacctctttcgtattaacggcaacttttttgctattatactttttcgggattgctttttatcaattgaaaaaagcgcctatgcaatacttagtgattttgttattgctgctcgtttctggtgaagcaatcattaacacacgggcgatggtcactggtattttagatgattggaactacgcatcacgtagtttgtattctgaaccttatcctgacttaaaaaatctagtctatcaaacaaaaaaagaaaatgatactttttatcgcttggaaaatttaaatggtgtttcggccaatgacggcattaactatggctacagtggcattagcatgttttcttccgtacggaaccgacattcttcaacatacctaaacgccttaggtttccgctcgcgaggcacgaatttaaatattcgttaccaaaataataccttgttaatggatgctttgatgggcattaaatacaatattgctgaaaacaatccaatgaaattcggctttgaacgacaagcagctgctggtaaatatcagctttatcgcaacgaaaatgctttgccgttaggatttttagcagacaaagagatttacaatgtccggcaacctctcaatgataatttaggtagtcaaacaaatttactaaatgctttagccaataccaatgaacggtattttaccttttatcaaccaacgatgacg

SEQ ID NO: 96 - protein, 643 aa, Enterococcus faecalis
MKNKSRQFLKNNWPYMLASFFIPFLIMAIIYLSIGIYPGSSRSVLASDAFSQFSNFHASFNNVLHGKQSLFYTWNASLGLNYLSLISYYLGGLFTPLVFFFNNQNMPDALYFLTLLKIGSAGLSFWFLAKQTFKIPKWSHVTLSVSYALMSFIVAHSELIMWLDAFIYLPLVILGIHRLMDQRKPTLLFVSYFLLFITNYYFGFMIGLFSFLYYFARTFTDWQRYKSRIVAYFTTSLLAGGASMIMVLPAVLDLRTNGETLSEITTFKTEATAFLDIIMKNMIGVYDTTKYGSIPFIYIGLLPLIFCLFYFVTKEIPLKNKLLFGSLFVLLIASFYITPLNLFWHGMHAPNMFLFRYSFLFSFLVILLAGYGWEKFEKDDLGVLSGLILILLAIFALAMGTKGATSYTYVTLTSFVLTATFLLLYFFGIAFYQLKKAPMQYLVILLLLLVSGEAIINTRAMVTGILDDWNYASRSLYSEPYPDLKNLVYQTKKENDTFYRLENLNGVSANDGINYGYSGISMFSSVRNRHSSTYLNALGFRSRGTNLNIRYQNNTLLMDALMGIKYNIAENNPMKFGFERQAAAGKYQLYRNENALPLGFLADKEIYNVRQPLNDNLGSQTNLLNALANTNERYFTFYQPTMT

SEQ ID NO: 97 - DNA, 1681 bp, Enterococcus faecalis
atgaaaaataaaagtaggcagtttttaaaaaacaactggccttatatgttagccagtttcttcattccatttttaattatggcaattatctatttgagtattgggatttatccaggaagtagtcgcagtgttttagccagcgatgccttttctcaattttcaaattttcacgcaagctttaacaatgttcttcatggaaaacaaagtcttttctatacgtggaatgcttctttgggactaaactacttgtccttaatttcctattatcttggtggcttatttacgccgctcgtctttttctttaacaatcaaaacatgcctgatgcgctctatttcctaacgttgttgaaaattgggagtgctggcttgagtttttggttcttggcaaaacaaacctttaagattcctaaatggtcccatgtgactttaagtgtgtcttatgcgctaatgtccttcattgtggcccattcagaattaattatgtggctggatgcctttatttatctgccactcgtaattttaggaattcatcgtttaatggaccaacgaaaaccgacattattgtttgtcagttatttcttgcttttcattacaaattattattttggctttatgattgggttgttttccttcctgtactattttgcacgaacgtttacagactggcaacgatataaatctcgaatcgttgcgtattttactacttctcttttagctggtggagcatccatgattatggtcttacctgctgtcttagatttacgaaccaatggtgaaactctttctgaaattacaacctttaaaacagaagcgactgcctttttagatattattatgaaaaatatgattggcgtttacgatacaaccaaatatgggtccattccttttatttacattgggttgttgcctttgattttttgtctcttctatttcgttacgaaagaagttccgttgaaaaacaaactactttttggcagtttgtttgtcctattgattgctagcttttacatcacgcccttaaatttattctggcacggtatgcatgcgccgaacatgtttcttttccgctatagtttcctcttttcattcctagttattttgcttgctggttatggttgggaaaaatttgaaaaggatgatctcggcgtcttaagcggcttgattttgattcttttagcaatttttgctcttgcaatgggcacaaaaggtgctactagttatacgtatgtgactttaacctctttcgtattaacggcaacttttttactattatactttttcggaattgctttttatcaattgaaaaaagcgcctatgcaatacttagtgattttgttattgctgctcgtttctggtgaagcaatcattaatacacgggcgatggtcactggtattttagatgattggaactacgcatcacgcagcttgtattctgagccttaccctgacttaaaaaatctagtcgatcaaacaaaaaaagaaaatgataccttttatcgcttggaaaatttaaatggtgtttcggccaatgacggcattaactatggctacagtggcattagcatgttttcttccgtacggaaccgacattcttcaacatacctaaacgccttaggtttccgctcgcgaggcacgaatttaaatattcgttaccaaaataataccttgttaatggatgctt

SEQ ID NO: 98 - protein, 560 aa, Enterococcus faecalis
MKNKSRQFLKNNWPYMLASFFIPFLIMAIIYLSIGIYPGSSRSVLASDAFSQFSNFHASFNNVLHGKQSLFYTWNASLGLNYLSLISYYLGGLFTPLVFFFNNQNMPDALYFLTLLKIGSAGLSFWFLAKQTFKIPKWSHVTLSVSYALMSFIVAHSELIMWLDAFIYLPLVILGIHRLMDQRKPTLLFVSYFLLFITNYYFGFMIGLFSFLYYFARTFTDWQRYKSRIVAYFTTSLLAGGASMIMVLPAVLDLRTNGETLSEITTFKTEATAFLDIIMKNMIGVYDTTKYGSIPFIYIGLLPLIFCLFYFVTKEVPLKNKLLFGSLFVLLIASFYITPLNLFWHGMHAPNMFLFRYSFLFSFLVILLAGYGWEKFEKDDLGVLSGLILILLAIFALAMGTKGATSYTYVTLTSFVLTATFLLLYFFGIAFYQLKKAPMQYLVILLLLLVSGEAIINTRAMVTGILDDWNYASRSLYSEPYPDLKNLVDQTKKENDTFYRLENLNGVSANDGINYGYSGISMFSSVRNRHSSTYLNALGFRSRGTNLNIRYQNNTLLMDA

SEQ ID NO: 99 - DNA, 1654 bp, Enterococcus faecalis
atgaaaaataaaagtaggcagtttttaaaaaacaactggccttatatgttagccagtttcttcattccatttttaattatggcaattatctatttgagtattgggatttatccaggaagtagtcgcagtgttttagccagcgatgccttttctcaattttcaaattttcacgcaagctttaacaatgttcttcatggaaaacaaagtcttttctatacgtggaatgcttctttgggactaaactacttgtccttaatttcctattatcttggtggcttatttacgccgctcgtctttttctttaacaatcaaaacatgcctgatgcgctctatttcctaacgttgttgaaaattgggagtgctggcttgagtttttggttcttggcaaaacaaacctttaagattcctaaatggtcccatgtgactttaagtgtgtcttatgcgctaatgtccttcattgtggcccattcagaattaattatgtggctggatgcctttatttatctgccactcgtaattttaggaattcatcgtttaatggaccaacgaaaaccgacattattgtttgtcagttatttcttgcttttcattacaaattattattttggctttatgattgggttgttttccttcctgtactattttgcacgaacgtttacagactggcaacgatataaatctcgaatcgttgcgtattttactacttctcttttagctggtggagcatccatgattatggttttacctgctgtcttagatttacgaaccaatggtgaaactctttctgaaattacaacctttaaaacagaagcgactgcctttttagatattattatgaaaaatatgattggcgtttacgatacaaccaaatatgggtccattccttttatttacattgggttgttgcctttgattttttgtctcttctatttcgttacgaaagaagttccgttgaaaaacaaactactttttggcagtttgtttgtcctattgattgctagcttttacatcacgcccttaaatttattctggcacggtatgcatgcgccgaacatgtttcttttccgctatagtttcctcttttcattcctagttattttgcttgctggttatggttgggaaaaatttgaaaaggatgatctcggcgtcttaagcggcttgattttgattcttttagcaatttttgctcttgcaatgggcacaaaaggtgctactagttatacgtatgtgactttaacctctttcgtattaacggcaacttttttactattatactttttcggaattgctttttatcaattgaaaaaagcgcctatgcaatacttagtgattttgttattgctgctcgtttctggtgaagcaatcattaatacacgggcgatggtcactggtattttagatgattggaactacgcatcacgcagcttgtattctgagccttaccctgacttaaaaaatctagtcgatcaaacaaaaaaagaaaatgataccttttatcgcttggaaaatttaaatggtgtttcggccaatgacggcattaactatggctacagtggcattagcatgttttcttccgtacggaaccgacattcttcaacatacctaaacgccttaggtttccgctcgcgaggcacgaatttaaatattcgttacc

SEQ ID NO: 100 - protein, 551 aa, Enterococcus faecalis
MKNKSRQFLKNNWPYMLASFFIPFLIMAIIYLSIGIYPGSSRSVLASDAFSQFSNFHASFNNVLHGKQSLFYTWNASLGLNYLSLISYYLGGLFTPLVFFFNNQNMPDALYFLTLLKIGSAGLSFWFLAKQTFKIPKWSHVTLSVSYALMSFIVAHSELIMWLDAFIYLPLVILGIHRLMDQRKPTLLFVSYFLLFITNYYFGFMIGLFSFLYYFARTFTDWQRYKSRIVAYFTTSLLAGGASMIMVLPAVLDLRTNGETLSEITTFKTEATAFLDIIMKNMIGVYDTTKYGSIPFIYIGLLPLIFCLFYFVTKEVPLKNKLLFGSLFVLLIASFYITPLNLFWHGMHAPNMFLFRYSFLFSFLVILLAGYGWEKFEKDDLGVLSGLILILLAIFALAMGTKGATSYTYVTLTSFVLTATFLLLYFFGIAFYQLKKAPMQYLVILLLLLVSGEAIINTRAMVTGILDDWNYASRSLYSEPYPDLKNLVDQTKKENDTFYRLENLNGVSANDGINYGYSGISMFSSVRNRHSSTYLNALGFRSRGTNLNIRY

SEQ ID NO: 101 - DNA, 2616 bp, Enterococcus faecalis
atgaaaaataaaagtaggcagtttttaaaaaacaactggccttatatgttagccagtttcttcattccatttttaattatggcaattatctatttgagtattgggatttatccaggaagtagtcgcagtgttttagccagcgatgccttttctcaattttcaaattttcacgcaagctttaacaatgttcttcatggaaaacaaagtcttttctatacgtggaatgcttctttgggactaaactacttgtccttaatttcctattatcttggtggcttatttacgccgctcgtctttttctttaacaatcaaaacatgcctgatgcgctctatttcctaacgttgttgaaaattgggagtgctggcttgagtttttggttcttggcaaaacaaacctttaagattcctaaatggtcccatgtgactttaagtgtgtcttatgcgctaatgtccttcattgtggcccattcagaattaattatgtggctggatgcctttatttatctgccactcgtaattttaggaattcatcgtttaatggaccaacgaaaaccgacattattgtttgtcagttatttcttgcttttcattacaaattattattttggctttatgattgggttgttttccttcctgtactattttgcacgaacgtttacagacttgcaacgatataaatctcgaatcgttgcgtattttactacttctcttttagctggtggagcatccatgattatggtcttacctgctgtcttagatttacgaaccaatggtgaaactctttctgaaattacaacctttaaaacagaagcgactgcctttttagatattattatgaaaaatatgattggcgtttacgatacaaccaaatatgggtccattccttttatttacattgggttgttgcctttgattttttgtctcttctatttcgttacgaaagaagttccattgaaaaacaaactactttttggcagtttgtttgtcctattgattgctagcttttacatcacgcccttaaatttattctggcacggtatgcatgcgccgaacatgtttcttttccgctatagtttcctcttttcattcttagttattttgcttgcaggttatggttgggagaaatttgaaaaggatgatctcggtgtcttaagcggcttgattttgattcttttagcaatttttgctcttgcaatgggcacaaaaggtgctactagttatacgtatgtgactttaacctctttcgtattaacggcaacttttttactattatactttttcgggattgctttttatcaattgaaaaaagcgcctatgcaatacttagtgattttactattgctgctcgtttctggtgaagcaatcattaatacacgggcaatggtcactggtattttagatgattggaactacgcatcacgcagcttgtattctgagccttatcctgacttaaaaaatctagtcgatcaaacaaaaaaagaaaatgataccttttaccgcttggaaaatttaaatggtgtttcggccaatgacggcattaactatggctacagtggcattagcatgttttcttccgtgcggaaccgacattcttcaacatacctaaacgccttaggtttccgctcacgaggcacgaatttaaatattcgttaccaaaataataccttgttaatggatgctttgatgggcattaaatacaatattgctgaaaataatccaatgaaattcggctttgaacgacaagcagctgctggtaaatatcagctttatcgtaacgaaaatgctttgccgttaggatttttagcagacaaagagatttacaatgttcggcaacctctcaatgataatttaggtagtcaaacaaatttactaaatgctttagccaataccaatgaacggtattttaccttttatcaaccaacgatgacgcttcaaaataacgtgacaattacgcaaaatacagctggcgtaacttttacggagaaacaacataacgtagccaaagagatttcttatacagtcaatgtgcccgccaatacgcaagcttatttgagtttattcccaacggattttgctcaattggaaagttccactgcgacggtcaccgtgaacggctcaagtcagcaatcacaaattggcattactggccaatattataacttaggttactatcccaaagatacaaccgttaacttcaaagtaagtttttatggaaccaaagcagtaagttttgttcagccgcaagtggttggcttaaataccaatgcatttgaaaaagccatttccgccgtgcaagaaaaaggcgttgatttaaccactggcaaacgctctgcttcaggtacctttaccgccgacaaagatcaagtactcgttactacaattccttatgacaaaggttggcgtgtcaaaattgatggcaaaaaagttaccccaaaagcctttaaagatgcctttctaagcgttcctgtcagcgctggaacccatactattcagttctcttatttaccagaaggattgattcctggcatcgtgttattcgttctatgtactggtggtttcgttgcctacgtaaccttgattcctgctagacgaaaccgtaaaaaagaagacaaataa

SEQ ID NO: 102 - protein, 871 aa, Enterococcus faecalis
MKNKSRQFLKNNWPYMLASFFIPFLIMAIIYLSIGIYPGSSRSVLASDAFSQFSNFHASFNNVLHGKQSLFYTWNASLGLNYLSLISYYLGGLFTPLVFFFNNQNMPDALYFLTLLKIGSAGLSFWFLAKQTFKIPKWSHVTLSVSYALMSFIVAHSELIMWLDAFIYLPLVILGIHRLMDQRKPTLLFVSYFLLFITNYYFGFMIGLFSFLYYFARTFTDLQRYKSRIVAYFTTSLLAGGASMIMVLPAVLDLRTNGETLSEITTFKTEATAFLDIIMKNMIGVYDTTKYGSIPFIYIGLLPLIFCLFYFVTKEVPLKNKLLFGSLFVLLIASFYITPLNLFWHGMHAPNMFLFRYSFLFSFLVILLAGYGWEKFEKDDLGVLSGLILILLAIFALAMGTKGATSYTYVTLTSFVLTATFLLLYFFGIAFYQLKKAPMQYLVILLLLLVSGEAIINTRAMVTGILDDWNYASRSLYSEPYPDLKNLVDQTKKENDTFYRLENLNGVSANDGINYGYSGISMFSSVRNRHSSTYLNALGFRSRGTNLNIRYQNNTLLMDALMGIKYNIAENNPMKFGFERQAAAGKYQLYRNENALPLGFLADKEIYNVRQPLNDNLGSQTNLLNALANTNERYFTFYQPTMTLQNNVTITQNTAGVTFTEKQHNVAKEISYTVNVPANTQAYLSLFPTDFAQLESSTATVTVNGSSQQSQIGITGQYYNLGYYPKDTTVNFKVSFYGTKAVSFVQPQVVGLNTNAFEKAISAVQEKGVDLTTGKRSASGTFTADKDQVLVTTIPYDKGWRVKIDGKKVTPKAFKDAFLSVPVSAGTHTIQFSYLPEGLIPGIVLFVLCTGGFVAYVTLIPARRNRKKEDK

SEQ ID NO: 103 - DNA, 2063 bp, Enterococcus faecalis
atgaaaaataaaagtaggcagtttttaaaaaacaactggccttatatgttagccagtttcttcattccatttttaattatggcaattatctatttgagtattgggatttatccaggaagtagtcgcagtgttttagccagcgatgccttttctcaattttcaaattttcacgcaagctttaacaatgttcttcatggaaaacaaagtcttttctatacgtggaatgcttctttgggactaaactacttgtccttaatttcctattatcttggtggcttatttacgccgctcgtctttttctttaacaatcaaaacatgcctgatgcgctctatttcctaacgttgttgaaaattgggagtgctggcttgagtttttggttcttggcaaaacaaacctttaagattcctaaatggtcccatgtgactttaagtgtgtcttatgcgctaatgtccttcattgtggcccattcagaattaattatgtggctggatgcctttatttatctgccactcgtaattttaggaattcatcgtttaatggaccaacgaaaaccgacattattgtttgtcagttatttcttgcttttcattacaaattattattttggctttatgattgggttgttttccttcctgtactattttgcacgaacgtttacagactggcaacgatataaatctcgaatcgttgcgtattttactacttctcttttagctggtggagcatccatgattatggtcttacctgctgtcttagatttacgaaccaatggtgaaactctttctgaaattacaacctttaaaacagaagcgactgcctttttagatattattatgaaaaatatgattggcgtttacgatacaaccaaatatgggtccattccttttatttacattgggttgttgcctttgattttttgtctcttctatttcgttacgaaagaaattccattgaaaaacaaactactttttggcagtttgtttgtcctattgattgctagcttttacatcacgcccttaaatttattctggcacggtatgcatgcgccgaacatgtttcttttccgctatagtttcctcttttcattcctagttattttgcttgctggttatggttgggaaaaatttgaaaaggatgatctcggcgtcttaagcggcttgattttgattcttttagcaatttttgctcttgcaatgggcacaaaaggtgctactagttatacgtatgtgactttaacctctttcgtattaacggcaacttttttactattatactttttcgggattgctttttatcaattgaaaaaagcgcctatgcaatacttagtgattttactattgctgctcgtttctggtgaagcaatcattaatacacgagcgatggtcactggtattttagatgattggaactacgcatcacgcagcttgtattctgagccttaccctgacttaaaaaatctagtcgatcaaacaaaaaaagaaaatgataccttttatcgcttggaaaatttaaatggtgtttcggccaatgacggcattaactatggctacagtggcattagcatgttttcttccgtacggaaccgacattcttcaacatacctaaacgccttaggtttccgctcgcgaggcacgaatttaaatattcgttaccaaaataataccttgttaatggatgctttgatgggcattaaatacaatattgctgaaaacaatccaatgaaattcggctttgagcgacaagcagctgctggtaaatatcagctttatcgtaacgaaaatgctttgccgttaggatttttagcagacaaagagatttacaatgtccggcaacctatcaatgataatttaggtagtcaaacaaatttactaaatgctttagccaataccaatgaacggtattttaccttttatcaaccaacgatgacgcttcaaaataacgtgacaattacgcaaaatacagctggcgtaacttttacggagaaacaacataacgtagccaaagagatttcttatacagtcaatgtgcccgccaatacgcaagcttatttgagtttattccc

SEQ ID NO: 104 - protein, 688 aa, Enterococcus faecalis
MKNKSRQFLKNNWPYMLASFFIPFLIMAIIYLSIGIYPGSSRSVLASDAFSQFSNFHASFNNVLHGKQSLFYTWNASLGLNYLSLISYYLGGLFTPLVFFFNNQNMPDALYFLTLLKIGSAGLSFWFLAKQTFKIPKWSHVTLSVSYALMSFIVAHSELIMWLDAFIYLPLVILGIHRLMDQRKPTLLFVSYFLLFITNYYFGFMIGLFSFLYYFARTFTDWQRYKSRIVAYFTTSLLAGGASMIMVLPAVLDLRTNGETLSEITTFKTEATAFLDIIMKNMIGVYDTTKYGSIPFIYIGLLPLIFCLFYFVTKEIPLKNKLLFGSLFVLLIASFYITPLNLFWHGMHAPNMFLFRYSFLFSFLVILLAGYGWEKFEKDDLGVLSGLILILLAIFALAMGTKGATSYTYVTLTSFVLTATFLLLYFFGIAFYQLKKAPMQYLVILLLLLVSGEAIINTRAMVTGILDDWNYASRSLYSEPYPDLKNLVDQTKKENDTFYRLENLNGVSANDGINYGYSGISMFSSVRNRHSSTYLNALGFRSRGTNLNIRYQNNTLLMDALMGIKYNIAENNPMKFGFERQAAAGKYQLYRNENALPLGFLADKEIYNVRQPINDNLGSQTNLLNALANTNERYFTFYQPTMTLQNNVTITQNTAGVTFTEKQHNVAKEISYTVNVPANTQAYLSLFP

SEQ ID NO: 105 - DNA, 2117 bp, Enterococcus faecalis
atgaaaaataaaagtaggcagtttttaaaaaacaactggccttatatgttagccagtttcttcattccatttttaattatggcaattatctatttgagtattgggatttatccaggaagtagtcgcagtgttttagccagcgatgccttttctcaattttcaaattttcacgcaagctttaacaatgttcttcatggaaaacaaagtcttttctatacgtggaatgcttctttgggactaaactacttgtccttaatttcctattatcttggtggcttatttacgccgcttgtctttttctttaacaatcaaaacatgcctgatgcgctctatttcctaacgttgttgaaaattgggagtgttggcttgagtttttggttcttggcaaaacaaacctttaagattcctaaatggtcccatgtgactttaagtgtgtcttatgcgctaatgtccttcattgtggcccattcagaattaattatgtggctggatgcctttatttatctgccactcgtaattttaggaattcatcgtttaatggaccaacgaaaaccgacattattgtttgtcagttatttctttcttttcattacaaattattattttggctttatgattgggttgttttccttcctgtactattttgcacgaacgtttacagactggcaacgatataaatctcgaatcgttgcatattttactacttctcttttagctggtggagcatccatgattatggtcttacctgctgtcttagatttacgaaccaatggtgaaactctttctgaaattacaacctttaaaacagaagcgactgcctttttagatattattatgaaaaatatgattggcgtttacgatacaaccaaatatgggtccattccttttatttacattgggttgttgcctttgattttttgtctcttctatttcgttacgaaagaagttccattgaaaaacaaactactttttggcagtttgtttgtcctattgattgctagcttttacatcacgcccttaaatttattctggcacggtatgcatgcgccgaacatgtttcttttccgctatagtttcctcttttcattcctagttattttgcttgctggttatggttgggaaaaatttgaaaaggatgatctcggcgtcttaagcggcttgattttgattcttttagcaatttttgctcttgcaatgggcacaaaaggtgctactagttatacgtatgtgactttaacctctttcgtattaacggcaacttttttactattatactttttcggaattgctttttatcaattgaaaaaagcgcctatgcaatacttagtgattttactattgctgctcgtttctggtgaagcaatcattaatacacgggcgatggtcactggtattttagatgattggaactacgcatcacgcagcttgtattctgagccttatcctgacttaaaaaatctagtcgatcaaacaaaaaaagaaaatgataccttttaccgcttggaaaatttaaatggtgtttcggccaatgacggcattaactatggctacagtggcattagcatgttttcttccgtacggaaccgacattcttcaacatacctaaacgccttaggtttccgctcgcgaggcacgaatttaaatattcgttaccaaaataataccttgttaatggatgctttgatgggcattaaatacaatattgctgaaaacaatccaatgaaattcggctttgagcgacaagctgctgctggtaaatatcagctttatcgtaacgaaaatgctttgccgttaggatttttagcagacaaagagatttacaatgtccggcaacctctcaatgataatttaggtagtcaaacaaatttactaaatgctttagccaataccaatgaacggtattttaccttttatcaaccaacgatgacgcttcaaaataacgtgacaattacgcaaaatacagctggcgtaacttttacggagaaacaacataacgtagccaaagagatttcttatacagtcaatgtgcccgccaatacgcaagcttatttgagtttattcccaacggattttgctcaattggaaagttccactgcgacggtcaccgtgaacggctc

SEQ ID NO: 106 - protein, 706 aa, Enterococcus faecalis
MKNKSRQFLKNNWPYMLASFFIPFLIMAIIYLSIGIYPGSSRSVLASDAFSQFSNFHASFNNVLHGKQSLFYTWNASLGLNYLSLISYYLGGLFTPLVFFFNNQNMPDALYFLTLLKIGSVGLSFWFLAKQTFKIPKWSHVTLSVSYALMSFIVAHSELIMWLDAFIYLPLVILGIHRLMDQRKPTLLFVSYFFLFITNYYFGFMIGLFSFLYYFARTFTDWQRYKSRIVAYFTTSLLAGGASMIMVLPAVLDLRTNGETLSEITTFKTEATAFLDIIMKNMIGVYDTTKYGSIPFIYIGLLPLIFCLFYFVTKEVPLKNKLLFGSLFVLLIASFYITPLNLFWHGMHAPNMFLFRYSFLFSFLVILLAGYGWEKFEKDDLGVLSGLILILLAIFALAMGTKGATSYTYVTLTSFVLTATFLLLYFFGIAFYQLKKAPMQYLVILLLLLVSGEAIINTRAMVTGILDDWNYASRSLYSEPYPDLKNLVDQTKKENDTFYRLENLNGVSANDGINYGYSGISMFSSVRNRHSSTYLNALGFRSRGTNLNIRYQNNTLLMDALMGIKYNIAENNPMKFGFERQAAAGKYQLYRNENALPLGFLADKEIYNVRQPLNDNLGSQTNLLNALANTNERYFTFYQPTMTLQNNVTITQNTAGVTFTEKQHNVAKEISYTVNVPANTQAYLSLFPTDFAQLESSTATVTVNGS

SEQ ID NO: 107 - DNA, 2616 bp, Enterococcus faecalis
atgaaaaataaaagtaggcagtttttaaaaaacaactggccttatatgttagccagtttcttcattccatttttaattatggcaattatctatttgagtattgggatttatccaggaagtagtcgcagtgttttagccagcgatgccttttctcaattttcaaactttcacgcaagctttaacaatgttcttcatggaaaacaaagtcttttctatacgtggaatgcttctttgggattaaactacttgtccttaatttcctattatcttggtggcttatttacgccgctcgtctttttctttaacaatcaaaacatgcctgatgcgctctatttcctaacgttgttgaaaattgggagtgctggcttgagtttttggttcttggcaaaacaaacctttaagattcctaaatggtcccatgtgactttaagtgtgtcttatgcgctaatgtccttcattgtggcccattcagaattaattatgtggctggatgcctttatttatctgccactcgtaattttaggaattcatcgtttaatggaccaacgaaaaccgacattattgtttgtcagttatttcttgcttttcattacaaattattattttggctttatgattgggttgttttccttcctgtactattttgcacgaacgtttacagactggcaacgatataaatctcgaatcgttgcgtattttactacttctcttttagctggtggagcatccatgattatggtcttacctgctgtcttagatttacgaaccaatggtgaaactctttctgaaattacaacctttaaaacagaagcgactgcctttttagatattattatgaaaaatatgattggcgtttacgatacaaccaaatatgggtccattccttttatttacattgggttgttgcctttgattttttgtctcttctatttcgttacgaaagaagttccattgaaaaacaaactactttttggcagtttgtttgtcctattgattgctagcttttacatcacgcccttaaatttattctggcacggtatgcatgcgccgaacatgtttcttttccgctatagtttcctcttttcattcttagttattttgcttgcaggttatggttgggagaaatttgaaaaggatgatctcggcgtcttaagcggcttgattttgattcttttagcaatttttgctcttgcaatgggcacaaaaggtgctactagttatacgtatgtgactttaacctctttcgtactaacagcaacttttttactattatactttttcggaattgctttttatcaattgaaaaaagcgcctatgcaatacttagtgattttgttattgctgctcgtttctggtgaagcaatcattaacacacgggcgatggtcactggtattttagatgattggaactacgcatcacgtagcttgtattctgaaccttatcctgacctaaaaaatctagtcgatcagacaaaaaaagaaaatgataccttttaccgcttggaaaatttaaatggtgtttcggccaatgacggcattaactatggctacagtggcattagcatgttttcttccgtacggaaccgacattcttcaacatacctaaacgccttaggtttccgctcacgaggcacgaatttaaatattcgttaccaaaataataccttgttaatggatgctttgatgggcattaaatacaatattgctgaaaacaatccaatgaaattcggttttgaacgacaagctgctgctggtaaatatcaactttatcgtaacgaaaatgctttgccgttaggatttttagcaaacaaagagatttacaatgtccggcaacctctcaatgataatttaggtagtcaaacaaatttactaaatgctttagccaataccaatgaacggtattttaccttttatcaaccaacgatgacgcttcaaaataacgtgacaattacgcaaaatacagctggcgtaacttttacggagaaacaacataacgtagccaaagagatttcttatacagtcaatgtgcccgccaatacgcaagcttatttgagtttattcccaacggattttgctcaattggaaagttccactgcgacggtcaccgtgaacggctcaagtcagcaatcacaaattggcattactggccaatattataatttaggttactatcccaaagatacaactgttaacttcaaagtaagtttttatggaaccaaagcagtaagttttgttcagccgcaagtggttggcttaaataccaatgcatttgaaaaagccatttccgccgtacaagaaaaaggcgttgatttaaccactggcaaacgctctgcttcaggtacttttaccgccgacaacgatcaagtactcgtcactacaattccttatgacaaaggttggcgtgtcaaaattgacggcaaaaaagttaccccaaaagcctttaaagatgcctttctaagcgttcctgtcagcgctggaacccatactattcagttctcttatttaccagaaggattgattcctggcatcgtgttattcgttctatgtactggtggtttcgttgcatacgtaaccttgattcctgctagacgaaaccgtaaaaaagaagacaaataa

SEQ ID NO: 108 - protein, 871 aa, Enterococcus faecalis
MKNKSRQFLKNNWPYMLASFFIPFLIMAIIYLSIGIYPGSSRSVLASDAFSQFSNFHASFNNVLHGKQSLFYTWNASLGLNYLSLISYYLGGLFTPLVFFFNNQNMPDALYFLTLLKIGSAGLSFWFLAKQTFKIPKWSHVTLSVSYALMSFIVAHSELIMWLDAFIYLPLVILGIHRLMDQRKPTLLFVSYFLLFITNYYFGFMIGLFSFLYYFARTFTDWQRYKSRIVAYFTTSLLAGGASMIMVLPAVLDLRTNGETLSEITTFKTEATAFLDIIMKNMIGVYDTTKYGSIPFIYIGLLPLIFCLFYFVTKEVPLKNKLLFGSLFVLLIASFYITPLNLFWHGMHAPNMFLFRYSFLFSFLVILLAGYGWEKFEKDDLGVLSGLILILLAIFALAMGTKGATSYTYVTLTSFVLTATFLLLYFFGIAFYQLKKAPMQYLVILLLLLVSGEAIINTRAMVTGILDDWNYASRSLYSEPYPDLKNLVDQTKKENDTFYRLENLNGVSANDGINYGYSGISMFSSVRNRHSSTYLNALGFRSRGTNLNIRYQNNTLLMDALMGIKYNIAENNPMKFGFERQAAAGKYQLYRNENALPLGFLANKEIYNVRQPLNDNLGSQTNLLNALANTNERYFTFYQPTMTLQNNVTITQNTAGVTFTEKQHNVAKEISYTVNVPANTQAYLSLFPTDFAQLESSTATVTVNGSSQQSQIGITGQYYNLGYYPKDTTVNFKVSFYGTKAVSFVQPQVVGLNTNAFEKAISAVQEKGVDLTTGKRSASGTFTADNDQVLVTTIPYDKGWRVKIDGKKVTPKAFKDAFLSVPVSAGTHTIQFSYLPEGLIPGIVLFVLCTGGFVAYVTLIPARRNRKKEDK

SEQ ID NO: 109 - DNA, 2123 bp, Enterococcus faecalis
atgaaaaataaaagtaggcagtttttaaaaaacaactggccttatatgttagccagtttcttcattccatttttaattatggcaattatctatttgagtattgggatttatccaggaagtagtcgcagtgttttagccagcgatgccttttctcaattttcaaattttcacgcaagctttaacaatgttcttcatggaaaacaaagtcttttctatacgtggaatgcttctttgggactaaactacttgtccttaatttcctattatcttggtggcttatttacgccgctcgtctttttctttaacaatcaaaacatgcctgatgcgctctatttcctaacgttgttgaaaattgggagtgctggcttgagtttttggttcttggcaaaacaaacctttaagattcctaaatggtcccatgtgactttaagtgtgtcttatgcgctaatgtccttcattgtggcccattcagaattaattatgtggctggatgcctttatttatctgccactcgtaattttaggaattcatcgtttaatggaccaacgaaaaccgacattattgtttgtcagttatttcttgcttttcattacaaattattattttggctttatgattgggttgttttccttcctgtactattttgcacgaacgtttacagactggcaacgatataaatctcgaatcgttgcgtattttactacttctcttttagctggtggagcatccatgattatggtcttacctgctgtcttagatttacgaaccaatggtgaaactctttctgaaattacaacctttaaaacagaagcgactgcctttttagatattattatgaaaaatatgattggcgtttacgatacaaccaaatatgggtccattccttttatttacattgggttgttgcctttgattttttgtctcttctatttcgttacgaaagaaattccattgaaaaacaaactactttttggcagtttgtttgtcctattgattgctagcttttacatcacgcccttaaatttattctggcacggtatgcatgcgccgaacatgtttcttttccgctatagtttcctcttttcattcctagttattttgcttgctggttatggttgggaaaaatttgaaaaggatgatctcggcgtcttaagcggcttgattttgattcttttagcaatttttgctcttgcaatgggcacaaaaggtgctactagttatacgtatgtgactttaacctctttcgtattaacggcaacttttttactattatactttttcgggattgctttttatcaattgaaaaaagcgcctatgcaatacttagtgattttactattgctgctcgtttctggtgaagcaatcattaatacacgagcgatggtcactggtattttagatgattggaactacgcatcacgcagcttgtattctgagccttaccctgacttaaaaaatctagtcgatcaaacaaaaaaagaaaatgataccttttatcgcttggaaaatttaaatggtgtttcggccaatgacggcattaactatggctacagtggcattagcatgttttcttccgtacggaaccgacattcttcaacatacctaaacgccttaggtttccgctcgcgaggcacgaatttaaatattcgttaccaaaataataccttgttaatggatgctttgatgggcattaaatacaatattgctgaaaacaatccaatgaaattcggctttgagcgacaagcagctgctggtaaatatcagctttatcgtaacgaaaatgctttgccgttaggatttttagcagacaaagagatttacaatgtccggcaacctatcaatgataatttaggtagtcaaacaaatttactaaatgctttagccaataccaatgaacggtattttaccttttatcaaccaacgatgacgcttcaaaataacgtgacaattacgcaaaatacagctggcgtaacttttacggagaaacaacataacgtagccaaagagatttcttatacagtcaatgtgcccgccaatacgcaagcttatttgagtttattcccaacggattttgctcaattggaaagttccactgcgacggtcaccgtgaacggctcgagtca

SEQ ID NO: 110 - protein, 707 aa, Enterococcus faecalis
MKNKSRQFLKNNWPYMLASFFIPFLIMAIIYLSIGIYPGSSRSVLASDAFSQFSNFHASFNNVLHGKQSLFYTWNASLGLNYLSLISYYLGGLFTPLVFFFNNQNMPDALYFLTLLKIGSAGLSFWFLAKQTFKIPKWSHVTLSVSYALMSFIVAHSELIMWLDAFIYLPLVILGIHRLMDQRKPTLLFVSYFLLFITNYYFGFMIGLFSFLYYFARTFTDWQRYKSRIVAYFTTSLLAGGASMIMVLPAVLDLRTNGETLSEITTFKTEATAFLDIIMKNMIGVYDTTKYGSIPFIYIGLLPLIFCLFYFVTKEIPLKNKLLFGSLFVLLIASFYITPLNLFWHGMHAPNMFLFRYSFLFSFLVILLAGYGWEKFEKDDLGVLSGLILILLAIFALAMGTKGATSYTYVTLTSFVLTATFLLLYFFGIAFYQLKKAPMQYLVILLLLLVSGEAIINTRAMVTGILDDWNYASRSLYSEPYPDLKNLVDQTKKENDTFYRLENLNGVSANDGINYGYSGISMFSSVRNRHSSTYLNALGFRSRGTNLNIRYQNNTLLMDALMGIKYNIAENNPMKFGFERQAAAGKYQLYRNENALPLGFLADKEIYNVRQPINDNLGSQTNLLNALANTNERYFTFYQPTMTLQNNVTITQNTAGVTFTEKQHNVAKEISYTVNVPANTQAYLSLFPTDFAQLESSTATVTVNGSS

SEQ ID NO: 111 - DNA, 2616 bp, Enterococcus faecalis
atgaaaaataaaagtaggcagtttttaaaaaacaactggccttatatgttagccagtttcttcattccatttttaattatggcaattatctatttgagtattgggatttatccaggaagtagtcgcagtgttttagccagcgatgccttttctcaattttcaaattttcacgcaagctttaacaatgttcttcatggaaaacaaagtcttttctatacgtggaatgcttctttgggactaaactacttgtccttaatttcctattatcttggtggcttatttacgccgctcgtctttttctttaacaatcaaaacatgcctgatgcgctctatttcctaacgttgttgaaaattgggagtgctggcttgagtttttggttcttggcaaaacaaacctttaagattcctaaatggtcccatgtgactttaagtgtgtcttatgcgctaatgtccttcattgtggcccattcagaattaattatgtggttggatgcctttatttatctgccactcgtaattttaggaattcatcgtttaatggaccaacgaaaaccgacattattgtttgtcagttatttcttgcttttcattacaaattattattttggctttatgattgggttgttttccttcctgtactattttgcacgaacgtttacagactggcaacgatataaatctcgaatcgttgcgtattttactacttctcttttagctggtggagcatccatgattatggtcttacctgctgtcttagatttacgaaccaatggtgaaactctttctgaaattacaacctttaaaacagaagcgactgcctttttagatattattatgaaaaatatgattggcgtttacgatacaaccaaatatgggtccattccttttatttacattgggttgttgcctttgattttttgtctcttctatttcgttacgaaagaaattccattgaaaaacaaactactttttggcagtttgtttgtcctattgattgctagcttttacatcacgcccttaaatttattctggcacggtatgcatgcgccgaacatgtttcttttccgctatagtttcctcttttcattcctagttattttgcttgctggttatggttgggaaaaatttgaaaaggatgatctcggcgtcttaagcggcttgattttgattcttttagcaatttttgctcttgcaatgggcacaaaaggtgctactagttatacgtatgtgactttaacctctttcgtattaacggcaacttttttactattatactttttcgggattgctttttatcaattgaaaaaagcgcctatgcaatacttagtgattttactattgctgctcgtttctggtgaagcaatcattaatacacgagcgatggtcactggtattttagatgattggaactacgcatcacgcagcttgtattctgagccttaccctgacttaaaaaatctagtcgatcaaacaaaaaaagaaaatgataccttttatcgcttggaaaatttaaatggtgtttcggccaatgacggcattaactatggctacagtggcattagcatgttttcttccgtacggaaccgacattcttcaacatacctaaacgccttaggtttccgctcgcgaggcacgaatttaaatattcgttaccaaaataataccttgttaatggatgctttgatgggcattaaatacaatattgctgaaaacaatccaatgaaattcggctttgagcgacaagcagctgctggtaaatatcagctttatcgtaacgaaaatgctttgccgttaggatttttagcagacaaagagatttacaatgtccggcaacctctcaatgataatttaggtagtcaaacaaatttactaaatgctttagccaataccaatgaacggtattttaccttttatcaaccaacgatgacgcttcaaaataacgtgacaattacgcaaaatacagctggcgtaacttttacggagaaacaacataacgtagccaaagagatttcttatacagtcaatgtgcccgccaatacgcaagcttatttaagtttattcccaacggattttgctcaattggaaagttccactgcgacggtcaccgtgaatggctcgagtcagcaatcacaaattggcattactggccaatattataatttaggctactatccaaaagatacaactgttaacttcaaagtaagtttttatggaaccaaagcagtaagttttgttcagccgcaagtagttggcttaaataccaatgcatttgaaaaagccatttccgctgtgcaagaaaaaggcgttgatttaaccactggcaaacgctctgcttcaggtacctttaccgccgacaaagatcaagtactcgtcactacaattccttatgacaaaggttggcgtgtcaaaattgatggcaaaaaagttaccccaaaagcctttaaagatgcctttctaagcgttcctgtcagcgctggaacccatactattcagttctcttatttaccagaaggattgattcctggcatcgtgttattcgttctatgtactggtggtttcgttgcctacgtaaccttgattcctgctagacgaaaccgtaaaaaagaagacaaataa

SEQ ID NO: 112 - protein, 871 aa, Enterococcus faecalis
MKNKSRQFLKNNWPYMLASFFIPFLIMAIIYLSIGIYPGSSRSVLASDAFSQFSNFHASFNNVLHGKQSLFYTWNASLGLNYLSLISYYLGGLFTPLVFFFNNQNMPDALYFLTLLKIGSAGLSFWFLAKQTFKIPKWSHVTLSVSYALMSFIVAHSELIMWLDAFIYLPLVILGIHRLMDQRKPTLLFVSYFLLFITNYYFGFMIGLFSFLYYFARTFTDWQRYKSRIVAYFTTSLLAGGASMIMVLPAVLDLRTNGETLSEITTFKTEATAFLDIIMKNMIGVYDTTKYGSIPFIYIGLLPLIFCLFYFVTKEIPLKNKLLFGSLFVLLIASFYITPLNLFWHGMHAPNMFLFRYSFLFSFLVILLAGYGWEKFEKDDLGVLSGLILILLAIFALAMGTKGATSYTYVTLTSFVLTATFLLLYFFGIAFYQLKKAPMQYLVILLLLLVSGEAIINTRAMVTGILDDWNYASRSLYSEPYPDLKNLVDQTKKENDTFYRLENLNGVSANDGINYGYSGISMFSSVRNRHSSTYLNALGFRSRGTNLNIRYQNNTLLMDALMGIKYNIAENNPMKFGFERQAAAGKYQLYRNENALPLGFLADKEIYNVRQPLNDNLGSQTNLLNALANTNERYFTFYQPTMTLQNNVTITQNTAGVTFTEKQHNVAKEISYTVNVPANTQAYLSLFPTDFAQLESSTATVTVNGSSQQSQIGITGQYYNLGYYPKDTTVNFKVSFYGTKAVSFVQPQVVGLNTNAFEKAISAVQEKGVDLTTGKRSASGTFTADKDQVLVTTIPYDKGWRVKIDGKKVTPKAFKDAFLSVPVSAGTHTIQFSYLPEGLIPGIVLFVLCTGGFVAYVTLIPARRNRKKEDK

SEQ ID NO: 113 - DNA, 1979 bp, Enterococcus faecalis
atgaaaaataaaagtaggcagtttttaaaaaacaactggccttatatgttagccagtttcttcattccatttttaattatggcaattatctatttgagtattgggatttatccaggaagtagtcgcagtgttttagccagcgatgccttttctcaattttcaaattttcacgcaagctttaacaatgttcttcatggaaaacaaagtcttttctatacgtggaatgcttctttgggactaaactacttgtccttaatttcctattatcttggtggcttatttacgccgctcgtctttttctttaacaatcaaaacatgcctgatgcgctctatttcctaacgttgttgaaaattgggagtgctggcttgagtttttggttcttggcaaaacaaacctttaagattcctaaatggtcccatgtgactttaagtgtgtcttatgcgctaatgtccttcattgtggcccattcagaattaattatgtggctggatgcctttatttatctgccactcgtaattttaggaattcatcgtttaatggaccaacgaaaaccgacattattgtttgtcagttatttcttgcttttcattacaaattattattttggctttatgattgggttgttttccttcctgtactattttgcacgaacgtttacagactggcaacgatataaatctcgaatcgttgcgtattttactacttctcttttagctggtggagcatccatgattatggtcttacctgctgtcttagatttacgaaccaatggtgaaactctttctgaaattacaacctttaaaacagaagcgactgcctttttagatattattatgaaaaatatgattggcgtttacgatacaaccaaatatgggtccattccttttatttacattgggttgttgcctttgattttttgtctcttctatttcgttacgaaagaagttccattgaaaaacaaactactttttggcagtttgtttgtcctattgattgctagcttttacatcacgcccttaaatttattctggcacggtatgcatgcgccgaacatgtttcttttccgctatagtttcctcttttcattcctagttattttgcttgctggttatggttgggaaaaatttgaaaaggatgatctcggcgtcttaagcggcttgattttgattcttttagcaatttttgctcttgcaatgggcacaaaaggtgctactagttatacgtatgtgactttaacctctttcgtattaacggcaacttttttactattatactttttcgggattgctttttatcaattgaaaaaagcgcctatgcaatacttagtgattttgttattactgctcgtttctggtgaagcaatcattaatacacgggcgatggtcactggtattttagatgattggaactacgcatcacgcagcttgtattctgagccttaccctgacttaaaaaatctagtcgatcaaacaaaaaaagaaaatgataccttttatcgcttggaaaatttaaatggtgtttcggccaatgacggcattaactatggctacagtggcattagcatgttttcttccgtacggaaccgacattcttcaacatacctaaacgccttaggtttccgctcgcgaggcacgaatttaaatattcgttaccaaaataataccttgttaatggatgctttgatgggcattaaatacaatattgctgaaaacaatccaatgaaattcggctttgagcgacaagcagctgctggtaaatatcagctttatcgtaacgaaaatgctttgccgttaggatttttagcagacaaagagatttacaatgtccggcaacctatcaatgataatttaggtagtcaaacaaatttactaaatgctttagccaataccaatgaacggtattttaccttttatcaaccaacgatgacgcttcaaaataacgtgacaattacgcaaaatacagctggcgtaacttttaa

SEQ ID NO: 114 - protein, 659 aa, Enterococcus faecalis
MKNKSRQFLKNNWPYMLASFFIPFLIMAIIYLSIGIYPGSSRSVLASDAFSQFSNFHASFNNVLHGKQSLFYTWNASLGLNYLSLISYYLGGLFTPLVFFFNNQNMPDALYFLTLLKIGSAGLSFWFLAKQTFKIPKWSHVTLSVSYALMSFIVAHSELIMWLDAFIYLPLVILGIHRLMDQRKPTLLFVSYFLLFITNYYFGFMIGLFSFLYYFARTFTDWQRYKSRIVAYFTTSLLAGGASMIMVLPAVLDLRTNGETLSEITTFKTEATAFLDIIMKNMIGVYDTTKYGSIPFIYIGLLPLIFCLFYFVTKEVPLKNKLLFGSLFVLLIASFYITPLNLFWHGMHAPNMFLFRYSFLFSFLVILLAGYGWEKFEKDDLGVLSGLILILLAIFALAMGTKGATSYTYVTLTSFVLTATFLLLYFFGIAFYQLKKAPMQYLVILLLLLVSGEAIINTRAMVTGILDDWNYASRSLYSEPYPDLKNLVDQTKKENDTFYRLENLNGVSANDGINYGYSGISMFSSVRNRHSSTYLNALGFRSRGTNLNIRYQNNTLLMDALMGIKYNIAENNPMKFGFERQAAAGKYQLYRNENALPLGFLADKEIYNVRQPINDNLGSQTNLLNALANTNERYFTFYQPTMTLQNNVTITQNTAGVTF

SEQ ID NO: 115 - DNA, 1686 bp, Enterococcus faecalis
atgaaaaataaaagtaggcagtttttaaaaaacaactggccttatatgttagccagtttcttcattccatttttaattatggcaattatctatttgagtattgggatttatccaggaagtagtcgcagtgttttagccagcgatgccttttctcaattttcaaattttcacgcaagctttaacaatgttcttcatggaaaacaaagtcttttctatacgtggaatgcttctttgggactaaactacttgtccttaatttcctattatcttggtggcttatttacgccgctcgtctttttctttaacaatcaaaacatgcctgatgcgctctatttcctaacgttgttgaaaattgggagtgctggcttgagtttttggttcttggcaaaacaaacctttaagattcctaaatggtcccatgtgactttaagtgtgtcttatgcgctaatgtccttcattgtggcccattcagaattaattatgtggctggatgcctttatttatctgccactcgtaattttaggaattcatcgtttaatggaccaacgaaaaccgacattattgtttgtcagttatttcttgcttttcattacaaattattattttggctttatgattgggttgttttccttcctgtactattttgcacgaacgtttacagactggcaacgatataaatctcgaatcgttgcgtattttactacttctcttttagctggtggagcatccatgattatggtcttacctgctgtcttagatttacgaaccaatggtgaaactctttctgaaattacaacctttaaaacagaagcgactgcctttttagatattattatgaaaaatatgattggcgtttacgatacaaccaaatatgggtccattccttttatttacattgggttgttgcctttgattttttgtctcttctatttcgttacgaaagaaattccattgaaaaacaaactactttttggcagtttgtttgtcctattgattgctagcttttacatcacgcccttaaatttattctggcacggtatgcatgcgccgaacatgtttcttttccgctatagtttcctcttttcattcctagttattttgcttgctggttatggttgggaaaaatttgaaaaggatgatctcggcgtcttaagcggcttgattttgattcttttagcaatttttgctcttgcaatgggcacaaaaggtgctactagttatacgtatgtgactttaacctctttcgtattaacggcaacttttttactattatactttttcgggattgctttttatcaattgaaaaaagcgcctatgcaatacttagtgattttactattgctgctcgtttctggtgaagcaatcattaatacacgagcgatggtcactggtattttagatgattggaactacgcatcacgcagcttgtattctgagccttatcctgacttaaaaaatctagtcgatcaaacaaaaaaagaaaatgataccttttatcgcttggaaaatttaaatggtgtttcggccaatgacggcattaactatggctacagtggcattagcatgttttcttccgtacggaaccgacattcttcaacatacctaaacgccttaggtttccgctcgcgaggcacgaatttaaatattcgttaccaaaataataccttgttaatggatgctttgatg

SEQ ID NO: 116 - protein, 562 aa, Enterococcus faecalis
MKNKSRQFLKNNWPYMLASFFIPFLIMAIIYLSIGIYPGSSRSVLASDAFSQFSNFHASFNNVLHGKQSLFYTWNASLGLNYLSLISYYLGGLFTPLVFFFNNQNMPDALYFLTLLKIGSAGLSFWFLAKQTFKIPKWSHVTLSVSYALMSFIVAHSELIMWLDAFIYLPLVILGIHRLMDQRKPTLLFVSYFLLFITNYYFGFMIGLFSFLYYFARTFTDWQRYKSRIVAYFTTSLLAGGASMIMVLPAVLDLRTNGETLSEITTFKTEATAFLDIIMKNMIGVYDTTKYGSIPFIYIGLLPLIFCLFYFVTKEIPLKNKLLFGSLFVLLIASFYITPLNLFWHGMHAPNMFLFRYSFLFSFLVILLAGYGWEKFEKDDLGVLSGLILILLAIFALAMGTKGATSYTYVTLTSFVLTATFLLLYFFGIAFYQLKKAPMQYLVILLLLLVSGEAIINTRAMVTGILDDWNYASRSLYSEPYPDLKNLVDQTKKENDTFYRLENLNGVSANDGINYGYSGISMFSSVRNRHSSTYLNALGFRSRGTNLNIRYQNNTLLMDALM

SEQ ID NO: 117 - DNA, 2533 bp, Enterococcus faecalis
atgaaaaataaaagtaggcagtttttaaaaaacaactggccttatatgttagccagtttcttcattccatttttaattatggcaattatctatttgagtattgggatttatccaggaagtagtcgcagtgttttagccagcgatgccttttctcaattttcaaattttcacgcaagctttaacaatgttcttcatggaaaacaaagtcttttctatacgtggaatgcttctttgggactaaactacttgtccttaatttcctattatcttggtggcttatttacgccgctcgtctttttctttaacaatcaaaacatgcctgatgcgctctatttcctaacgttgttgaaaattgggagtgctggcttgagtttttggttcttggcaaaacaaacctttaagattcctaaatggtcccatgtgactttaagtgtgtcttatgcgctaatgtccttcattgtggcccattcagaattaattatgtggctggatgcctttatttatctgccactcgtaattttaggaattcatcgtttaatggaccaacgaaaaccgacattattgtttgtcagttatttcttgcttttcattacaaattattattttggctttatgattgggttgttttccttcctgtactattttgcacgaacgtttacagactggcaacgatataaatctcgaatcgttgcgtattttactacttctcttttagctggtggagcatccatgattatggtcttacctgctgtcttagatttacgaaccaatggtgaaactctttctgaaattacaacctttaaaacagaagcgactgcctttttagatattattatgaaaaatatgattggcgtttacgatacaaccaaatatgggtccattccttttatttacattgggttgttgcctttgattttttgtctcttctatttcgttacgaaagaaattccattgaaaaacaaactactttttggcagtttgtttgtcctattgattgctagcttttacatcacgcccttaaatttattctggcacggtatgcatgcgccgaacatgtttcttttccgctatagtttcctcttttcattcctagttattttgcttgctggttatggttgggaaaaatttgaaaaggatgatctcggcgtcttaagcggcttgattttgattcttttagcaatttttgctcttgcaatgggcacaaaaggtgctactagttatacgtatgtgactttaacctctttcgtattaacggcaacttttttactattatactttttcgggattgctttttatcaattgaaaaaagcgcctatgcaatacttagtgattttactattgctgctcgtttctggtgaagcaatcattaatacacgagcgatggtcactggtattttagatgattggaactacgcatcacgcagcttgtattctgagccttaccctgacttaaaaaatctagtcgatcaaacaaaaaaagaaaatgataccttttatcgcttggaaaatttaaatggtgtttcggccaatgacggcattaactatggctacagtggcattagcatgttttcttccgtacggaaccgacattcttcaacatacctaaacgccttaggtttccgctcgcgaggcacgaatttaaatattcgttaccaaaataataccttgttaatggatgctttgatgggcattaaatacaatattgctgaaaacaatccaatgaaattcggctttgagcgacaagcagctgctggtaaatatcagctttatcgtaacgaaaatgctttgccgttaggatttttagcagacaaagagatttacaatgtccggcaacctctcaatgataatttaggtagtcaaacaaatttactaaatgctttagccaataccaatgaacggtattttaccttttatcaaccaacgatgacgcttcaaaataacgtgacaattacgcaaaatacagctggcgtaacttttacggagaaacaacataacgtagccaaagagatttcttatacagtcaatgtgcccgccaatacgcaagcttatttgagtttattcccaacggattttgctcaattggaaagttccactgcgacggtcaccgtgaacggctcaagtcagcaatcacaaattggcattactggccaatattataatttaggctactatccaaaagatacaactgttaacttcaaagtaagtttttatggaaccaaagcagtaagttttgttcagccgcaagtggttggcttaaataccaatgcatttgaaaaagccatttccgccgtgcaagaaaaaggcgttgatttaaccactggcaaacgctctgcttcaggtacctttaccgccgacaaagatcaagtactcgtcactacaattccttatgacaaaggttggcgtgtcaaaattgatggcaaaaaagttaccccaaaagcctttaaagatgcctttctaagcgttcctgtcagcgctggaacccatactattcagttctcttatttaccagaaggattgattcctggcatcgtgt

SEQ ID NO: 118 - protein, 844 aa, Enterococcus faecalis
MKNKSRQFLKNNWPYMLASFFIPFLIMAIIYLSIGIYPGSSRSVLASDAFSQFSNFHASFNNVLHGKQSLFYTWNASLGLNYLSLISYYLGGLFTPLVFFFNNQNMPDALYFLTLLKIGSAGLSFWFLAKQTFKIPKWSHVTLSVSYALMSFIVAHSELIMWLDAFIYLPLVILGIHRLMDQRKPTLLFVSYFLLFITNYYFGFMIGLFSFLYYFARTFTDWQRYKSRIVAYFTTSLLAGGASMIMVLPAVLDLRTNGETLSEITTFKTEATAFLDIIMKNMIGVYDTTKYGSIPFIYIGLLPLIFCLFYFVTKEIPLKNKLLFGSLFVLLIASFYITPLNLFWHGMHAPNMFLFRYSFLFSFLVILLAGYGWEKFEKDDLGVLSGLILILLAIFALAMGTKGATSYTYVTLTSFVLTATFLLLYFFGIAFYQLKKAPMQYLVILLLLLVSGEAIINTRAMVTGILDDWNYASRSLYSEPYPDLKNLVDQTKKENDTFYRLENLNGVSANDGINYGYSGISMFSSVRNRHSSTYLNALGFRSRGTNLNIRYQNNTLLMDALMGIKYNIAENNPMKFGFERQAAAGKYQLYRNENALPLGFLADKEIYNVRQPLNDNLGSQTNLLNALANTNERYFTFYQPTMTLQNNVTITQNTAGVTFTEKQHNVAKEISYTVNVPANTQAYLSLFPTDFAQLESSTATVTVNGSSQQSQIGITGQYYNLGYYPKDTTVNFKVSFYGTKAVSFVQPQVVGLNTNAFEKAISAVQEKGVDLTTGKRSASGTFTADKDQVLVTTIPYDKGWRVKIDGKKVTPKAFKDAFLSVPVSAGTHTIQFSYLPEGLIPGIV

SEQ ID NO: 119 - DNA, 1736 bp, Enterococcus faecalis
atgaaaaataaaagtaggcagtttttaaaaaacaactggccttatatgttagccagtttcttcattccatttttaattatggcaattatctatttgagtattgggatttatccaggaagtagtcgcagtgttttagccagcgatgccttttctcaattttcaaattttcacgcaagctttaacaatgttcttcatggaaaacaaagtcttttctatacgtggaatgcttctttgggactaaactacttgtccttaatttcctattatcttggtggcttatttacgccgctcgtctttttctttaacaatcaaaacatgcctgatgcgctctatttcctaacgttgttgaaaattgggagtgctggcttgagtttttggttcttggcaaaacaaacctttaagattcctaaatggtcccatgtgactttaagtgtgtcttatgcgctaatgtccttcattgtggcccattcagaattaattatgtggctggatgcctttatttatctgccactcgtaattttaggaattcatcgtttaatggaccaacgaaaaccgacattattgtttgtcagttatttcttgcttttcattacaaattattattttggctttatgattgggttgttttccttcctgtactattttgcacgaacgtttacagactggcaacgatataaatctcgaatcgttgcgtattttactacttctcttttagctggtggagcatctatgattatggtcttacctgctgtcttagatttacgaaccaatggtgaaactctttctgaaattacaacctttaaaacagaagcgactgcctttttagatattattatgaaaaatatgattggcgtttacgatacaaccaaatatgggtccattccttttatttacattgggttgttgcctttgattttttgtctcttctatttcgttacgaaagaaattccattgaaaaacaaactactttttggcagtttgtttgtcctattgattgctagcttttacatcacgcccttaaatttattctggcacggtatgcatgcgccgaacatgtttcttttccgctatagtttcctcttttcattcctagttattttgcttgcaggttatggttgggagaaatttgaaaaggatgatctcggcgtcttaagcggcttgattttgattcttttagcaatttttgctcttgcaatgggcacaaaaggtgctactagttatacgtatgtgactttaacctctttcgtattaacggcaacttttttactattatactttttcgggattgctttttatcaattgaaaaaagcgcctatgcaatacttagtgattttgttgttgctgctcgtttctggtgaagcaatcattaatacacgggcgatggtcactggtattttagatgattggaactacgcatcacgcagcttgtattctgaaccttatcctgacttaaaaaatctagtcgatcaaacaaaaaaagaaaatgataccttttaccgcttggaaaatttaaatggtgtttcggccaatgacggcattaactatggctacagtggcattagcatgttttcttccgtacggaaccgacattcttcaacatacctaaacgccttaggtttccgctcacgaggcacgaatttaaatattcgttaccaaaataataccttgttaatggatgctttgatgggcattaaatacaatattgctgaaaacaatccaatgaaattcggctttga

SEQ ID NO: 120 - protein, 578 aa, Enterococcus faecalis
MKNKSRQFLKNNWPYMLASFFIPFLIMAIIYLSIGIYPGSSRSVLASDAFSQFSNFHASFNNVLHGKQSLFYTWNASLGLNYLSLISYYLGGLFTPLVFFFNNQNMPDALYFLTLLKIGSAGLSFWFLAKQTFKIPKWSHVTLSVSYALMSFIVAHSELIMWLDAFIYLPLVILGIHRLMDQRKPTLLFVSYFLLFITNYYFGFMIGLFSFLYYFARTFTDWQRYKSRIVAYFTTSLLAGGASMIMVLPAVLDLRTNGETLSEITTFKTEATAFLDIIMKNMIGVYDTTKYGSIPFIYIGLLPLIFCLFYFVTKEIPLKNKLLFGSLFVLLIASFYITPLNLFWHGMHAPNMFLFRYSFLFSFLVILLAGYGWEKFEKDDLGVLSGLILILLAIFALAMGTKGATSYTYVTLTSFVLTATFLLLYFFGIAFYQLKKAPMQYLVILLLLLVSGEAIINTRAMVTGILDDWNYASRSLYSEPYPDLKNLVDQTKKENDTFYRLENLNGVSANDGINYGYSGISMFSSVRNRHSSTYLNALGFRSRGTNLNIRYQNNTLLMDALMGIKYNIAENNPMKFGF

SEQ ID NO: 121 - DNA, 2616 bp, Enterococcus faecalis
atgaaaaataaaagtaggcagtttttaaaaaacaactggccttatatgttagccagtttcttcattccatttttaattatggcaattatctatttgagtattgggatttatccaggaagtagtcgcagtgttttagccagcgatgccttttctcaattttcaaattttcacgcaagctttaacaatgttcttcatggaaaacaaagtcttttctatacgtggaatgcttctttgggactaaactacttgtccttaatttcctattatcttggtggcttatttacgccgctcgtctttttctttaacaatcaaaacatgcctgatgcgctctatttcttaacgttgttgaaaattgggagtgctggcttgagtttttggttcttggcaaaacaaacctttaagattcctaaatggtcccatgtgactttaagtgtgtcttatgcgctaatgtccttcattgtggcccattcagaattaattatgtggctggatgcctttatttatctgccactcgtaattttaggaattcatcgtttaatggaccaacgaaaaccgacattattgtttgttagttatttcttgcttttcattacaaattattattttggctttatgattgggttgttttccttcctgtactattttgcacgaacgtttacagactggcaacgatataaatctcgaatcgttgcgtattttactacttctcttttagctggtggagcatccatgattatggtcttacctgctgtcttagatttacgaaccaatggtgaaactctttctgaaattacaacctttaaaacagaagcgactgcctttttagatattattatgaaaaatatgattggcgtttacgatacaaccaaatatgggtccattccttttatttacattgggttgttgcctttgattttttgtctcttctatttcgttacgaaagaagttccattgaaaaacaaactactttttggcagtttgtttgtcctattgattgctagcttttacatcacgcccttaaatttattctggcacggtatgcatgcgccgaacatgtttcttttccgctatagtttcctcttttcattcctagttattttgcttgctggttatggttgggaaaaatttgaaaaggatgatctcggcgtcttaagcggcttgattttgattcttttagcaatttttgctcttgcaatgggcacaaaaggtgctactagttatacgtatgtgactttaacctctttcgtattaacggcaacttttttactattatactttttcggaattgctttttatcaattgaaaaaagcgcctatgcaatacttagtgattttactattgctgctcgtttctggtgaagcaatcattaatacacgggcgatggtcactggtattttagatgattggaactacgcatcacgcagcttgtattctgaaccttatcctgacttaaaaaatctagtcgatcaaacaaaaaaagaaaatgataccttttaccgcttggaaaatttaaatggtgtttctgccaatgacggcattaactatggctacagtggcattagcatgttttcttccgtgcggaaccgacattcttcaacatacctaaacgccttaggtttccgctcacgaggcacgaatttaaatattcgttaccaaaataataccttgttaatggatgctttgatgggcattaaatacaatattgctgaaaacaatccaatgaaattcggctttgaacgacaagctgctgctggtaaatatcagctttatcgtaacgaaaatgctttgccgttaggatttttagcagacaaagagatttacaatgtccggcaacctctcaatgataatttaggtagtcaaacaaatttactaaatgctttagccaataccaatgaacggtattttaccttttatcaaccaacgatgacgcttcaaaataacgtgacaattacgcaaaatacagctggtgtaacttttacggagaaacaacataacgtagccaaagagatttcttatacagtcaatgtgcccgccaatacgcaagcttatttgagtttattcccaacggattttgctcaattggaaagttccactgcgacggtcaccgtgaacggctcaagtcagcaatcacaaattggcattactggccaatattataatttaggctactatccaaaagatacaactgttaacttcaaagtaagtttttatggaaccaaagcagtaagttttgttcagccgcaagtggttggcttaaataccaatgcatttgaaaaagccatttccgccgtgcaagaaaaaggcgttgatttaaccactggcaaacgctctgcttcaggtacctttaccgccgacaaagatcaagtactcatcactacaattccttatgacaaaggttggcatgtcaaaattgatggcaaaaaagttaccccaaaagcctttaaagatgcctttctaagcgttcctgtcagcgctggaacccatactattcagttctcttatttaccagaaggattgattcctggcatcgtgttattcgttctatgtactggtggtttcgttgcctacgtaaccttgattcctgctagacgaaaccgtaaaaaagaagacaaataa

SEQ ID NO: 122 - protein, 871 aa, Enterococcus faecalis
MKNKSRQFLKNNWPYMLASFFIPFLIMAIIYLSIGIYPGSSRSVLASDAFSQFSNFHASFNNVLHGKQSLFYTWNASLGLNYLSLISYYLGGLFTPLVFFFNNQNMPDALYFLTLLKIGSAGLSFWFLAKQTFKIPKWSHVTLSVSYALMSFIVAHSELIMWLDAFIYLPLVILGIHRLMDQRKPTLLFVSYFLLFITNYYFGFMIGLFSFLYYFARTFTDWQRYKSRIVAYFTTSLLAGGASMIMVLPAVLDLRTNGETLSEITTFKTEATAFLDIIMKNMIGVYDTTKYGSIPFIYIGLLPLIFCLFYFVTKEVPLKNKLLFGSLFVLLIASFYITPLNLFWHGMHAPNMFLFRYSFLFSFLVILLAGYGWEKFEKDDLGVLSGLILILLAIFALAMGTKGATSYTYVTLTSFVLTATFLLLYFFGIAFYQLKKAPMQYLVILLLLLVSGEAIINTRAMVTGILDDWNYASRSLYSEPYPDLKNLVDQTKKENDTFYRLENLNGVSANDGINYGYSGISMFSSVRNRHSSTYLNALGFRSRGTNLNIRYQNNTLLMDALMGIKYNIAENNPMKFGFERQAAAGKYQLYRNENALPLGFLADKEIYNVRQPLNDNLGSQTNLLNALANTNERYFTFYQPTMTLQNNVTITQNTAGVTFTEKQHNVAKEISYTVNVPANTQAYLSLFPTDFAQLESSTATVTVNGSSQQSQIGITGQYYNLGYYPKDTTVNFKVSFYGTKAVSFVQPQVVGLNTNAFEKAISAVQEKGVDLTTGKRSASGTFTADKDQVLITTIPYDKGWHVKIDGKKVTPKAFKDAFLSVPVSAGTHTIQFSYLPEGLIPGIVLFVLCTGGFVAYVTLIPARRNRKKEDK

SEQ ID NO: 123 - DNA, 2616 bp, Enterococcus faecalis
atgaaaaataaaagtaggcagtttttaaaaaacaactggccttatatgttagccagtttcttcattccatttttaattatggcaattatctatttgagtattgggatttatccaggaagtagtcgcagtgttttagccagcgatgccttttctcaattttcaaattttcacgcaagctttaacaatgttcttcatggaaaacaaagtcttttctatacgtggaatgcttctttgggactaaactacttgtccttaatttcctattatcttggtggcttatttacgccgctcgtctttttctttaacaatcaaaacatgcctgatgcgctctatttcctaacgttgttgaaaattgggagtgctggcttgagtttttggttcttggcaaaacaaacctttaagattcctaaatggtcccatgtgactttaagtgtgtcttatgcgctaatgtccttcattgtggcccattcagaattaattatgtggctggatgcctttatttatctgccactcgtaattttaggaattcatcgtttaatggaccaacgaaaaccgacattattgtttgtcagttatttcttgcttttcattacaaattattattttggctttatgattgggttgttttccttcctgtactattttgcacgaacgtttacagactggcaacgatataaatctcgaatcgttgcgtattttactacttctcttttagctggtggagcatccatgattatggtcttacctgctgtcttagatttacgaaccaatggtgaaactctttctgaaattacaacctttaaaacagaagcgactgcctttttagatattattatgaaaaatatgattggcgtttacgatacaaccaaatatgggtccattccttttatttacattgggttgttgcctttgattttttgtctcttctatttcgttacgaaagaaattccattgaaaaacaaactactttttggcagtttgtttgtcctattgattgctagcttttacatcacgcccttaaatttattctggcacggtatgcatgcgccgaacatgtttcttttccgctatagtttcctcttttcattcctagttattttgcttgctggttatggttgggaaaaatttgaaaaggatgatctcggcgtcttaagcggcttgattttgattcttttagcaatttttgctcttgcaatgggcacaaaaggtgctactagttatacgtatgtgactttaacctctttcgtattaacggcaacttttttactattatactttttcgggattgctttttatcaattgaaaaaagcgcctatgcaatacttagtgattttactattgctgctcgtttctggtgaagcaatcattaatacacgagcgatggtcactggtattttagatgattggaactacgcatcacgcagcttgtattctgagccttaccctgacttaaaaaatctagtcgatcaaacaaaaaaagaaaatgataccttttatcgcttggaaaatttaaatggtgtttcggccaatgacggcattaactatggctacagtggcattagcatgttttcttccgtacggaaccgacattcttcaacatacctaaacgccttaggtttccgctcgcgaggcacgaatttaaatattcgttaccaaaataataccttgttaatggatgctttgatgggcattaaatacaatattgctgaaaacaatccaatgaaattcggctttgagcgacaagcagctgctggtaaatatcagctttatcgtaacgaaaatgctttgccgttaggatttttagcagacaaagagatttacaatgtccggcaacctatcaatgataatttaggtagtcaaacaaatttactaaatgctttagccaataccaatgaacggtattttaccttttatcaaccaacgatgacgcttcaaaataacgtgacaattacgcaaaatacagctggcgtaacttttacggagaaacaacataacgtagccaaagagatttcttatacagtcaatgtgcccgccaatacgcaagcttatttgagtttattcccaacggattttgctcaattggaaagttccactgcgacggtcaccgtgaacggctcgagtcagcaatcacaaattggcattactggccaatattataatttaggctactatccaaaagatacaactgttaacttcaaagtaagtttttatggaaccaaagcagtaagttttgttcagccgcaagtagttggcttaaataccaatgcatttgaaaaagccatttccgccgtgcaagaaaaaggcgttgatttaaccactggcaaacgctctgcttcaggtacctttaccgccgacaaagatcaagtactcgtcactacaattccttatgacaaaggttggcgtgtcaaaattgatggcaaaaaagttaccccaaaagcctttaaagatgcctttctaagcgttcctgtcagcgctggaacccatactattcagttctcttatttaccagaaggattgattcctggcatcgtgttattcgttctatgtactggtggtttcgttgcatacgtaaccttgattcctgctagacgaaaccgtaaaaaagaagacaaataa

SEQ ID NO: 124 - protein, 871 aa, Enterococcus faecalis
MKNKSRQFLKNNWPYMLASFFIPFLIMAIIYLSIGIYPGSSRSVLASDAFSQFSNFHASFNNVLHGKQSLFYTWNASLGLNYLSLISYYLGGLFTPLVFFFNNQNMPDALYFLTLLKIGSAGLSFWFLAKQTFKIPKWSHVTLSVSYALMSFIVAHSELIMWLDAFIYLPLVILGIHRLMDQRKPTLLFVSYFLLFITNYYFGFMIGLFSFLYYFARTFTDWQRYKSRIVAYFTTSLLAGGASMIMVLPAVLDLRTNGETLSEITTFKTEATAFLDIIMKNMIGVYDTTKYGSIPFIYIGLLPLIFCLFYFVTKEIPLKNKLLFGSLFVLLIASFYITPLNLFWHGMHAPNMFLFRYSFLFSFLVILLAGYGWEKFEKDDLGVLSGLILILLAIFALAMGTKGATSYTYVTLTSFVLTATFLLLYFFGIAFYQLKKAPMQYLVILLLLLVSGEAIINTRAMVTGILDDWNYASRSLYSEPYPDLKNLVDQTKKENDTFYRLENLNGVSANDGINYGYSGISMFSSVRNRHSSTYLNALGFRSRGTNLNIRYQNNTLLMDALMGIKYNIAENNPMKFGFERQAAAGKYQLYRNENALPLGFLADKEIYNVRQPINDNLGSQTNLLNALANTNERYFTFYQPTMTLQNNVTITQNTAGVTFTEKQHNVAKEISYTVNVPANTQAYLSLFPTDFAQLESSTATVTVNGSSQQSQIGITGQYYNLGYYPKDTTVNFKVSFYGTKAVSFVQPQVVGLNTNAFEKAISAVQEKGVDLTTGKRSASGTFTADKDQVLVTTIPYDKGWRVKIDGKKVTPKAFKDAFLSVPVSAGTHTIQFSYLPEGLIPGIVLFVLCTGGFVAYVTLIPARRNRKKEDK

SEQ ID NO: 125 - DNA, 2409 bp, Enterococcus faecalis
atgaaaaataaaagtaggcagtttttaaaaaacaactggccttatatgttagccagtttcttcattccatttttaattatggcaattatctatttgagtattgggatttatccaggaagtagtcgcagtgttttagccagcgatgccttttctcaattttcaaattttcacgcaagctttaacaatgttcttcatggaaaacaaagtcttttctatacgtggaatgcttctttgggactaaactacttgtccttaatttcctattatcttggtggcttatttacgccgctcgtctttttctttaacaatcaaaacatgcctgatgcgctctatttcctaacgttgttgaaaattgggagtgctggcttgagtttttggttcttggcaaaacaaacctttaagattcctaaatggtcccatgtgactttaagtgtgtcttatgcgctaatgtccttcattgtggcccattcagaattaattatgtggctggatgcctttatttatctgccactcgtaattttaggaattcatcgtttaatggaccaacgaaaaccgacattattgtttgtcagttatttcttgcttttcattacaaattattattttggctttatgattgggttgttttccttcctgtactattttgcacgaacgtttacagactggcaacgatataaatctcgaatcgttgcgtattttactacttctcttttagctggtggagcatccatgattatggtcttacctgctgtcttagatttacgaaccaatggtgaaactctttctgaaattacaacctttaaaacagaagcgactgcctttttagatattattatgaaaaatatgattggcgtttacgatacaaccaaatatgggtccattccttttatttacattgggttgttgcctttgattttttgtctcttctatttcgttacgaaagaaattccattgaaaaacaaactactttttggcagtttgtttgtcctattgattgctagcttttacatcacgcccttaaatttattctggcacggtatgcatgcgccgaacatgtttcttttccgctatagtttcctcttttcattcctagttattttgcttgctggttatggttgggaaaaatttgaaaaggatgatctcggcgtcttaagcggcttgattttgattcttttagcaatttttgctcttgcaatgggcacaaaaggtgctactagttatacgtatgtgactttaacctctttcgtattaacggcaacttttttactattatactttttcgggattgctttttatcaattgaaaaaagcgcctatgcaatacttagtgattttactattgctgctcgtttctggtgaagcaatcattaatacacgagcgatggtcactggtattttagatgattggaactacgcatcacgcagcttgtattctgagccttaccctgacttaaaaaatctagtcgatcaaacaaaaaaagaaaatgataccttttatcgcttggaaaatttaaatggtgtttcggccaatgacggcattaactatggctacagtggcattagcatgttttcttccgtacggaaccgacattcttcaacatacctaaacgccttaggtttccgctcgcgaggcacgaatttaaatattcgttaccaaaataataccttgttaatggatgctttgatgggcattaaatacaatattgctgaaaacaatccaatgaaattcggctttgagcgacaagcagctgctggtaaatatcagctttatcgtaacgaaaatgctttgccgttaggatttttagcagacaaagagatttacaatgtccggcaacctatcaatgataatttaggtagtcaaacaaatttactaaatgctttagccaataccaatgaacggtattttaccttttatcaaccaacgatgacgcttcaaaataacgtgacaattacgcaaaatacagctggcgtaacttttacggagaaacaacataacgtagccaaagagatttcttatacagtcaatgtgcccgccaatacgcaagcttatttgagtttattcccaacggattttgctcaattggaaagttccactgcgacggtcaccgtgaacggctcgagtcagcaatcacaaattggcattactggccaatattataatttaggctactatccaaaagatacaactgttaacttcaaagtaagtttttatggaaccaaagcagtaagttttgttcagccgcaagtagttggcttaaataccaatgcatttgaaaaagccatttccgccgtgcaagaaaaaggcgttgatttaaccactggcaaacgctctgcttcaggtacctttaccgccgacaaagatcaagtactcgtcactacaattccttatgacaaaggttggcgtgtcaaa

SEQ ID NO: 126 - protein, 803 aa, Enterococcus faecalis
MKNKSRQFLKNNWPYMLASFFIPFLIMAIIYLSIGIYPGSSRSVLASDAFSQFSNFHASFNNVLHGKQSLFYTWNASLGLNYLSLISYYLGGLFTPLVFFFNNQNMPDALYFLTLLKIGSAGLSFWFLAKQTFKIPKWSHVTLSVSYALMSFIVAHSELIMWLDAFIYLPLVILGIHRLMDQRKPTLLFVSYFLLFITNYYFGFMIGLFSFLYYFARTFTDWQRYKSRIVAYFTTSLLAGGASMIMVLPAVLDLRTNGETLSEITTFKTEATAFLDIIMKNMIGVYDTTKYGSIPFIYIGLLPLIFCLFYFVTKEIPLKNKLLFGSLFVLLIASFYITPLNLFWHGMHAPNMFLFRYSFLFSFLVILLAGYGWEKFEKDDLGVLSGLILILLAIFALAMGTKGATSYTYVTLTSFVLTATFLLLYFFGIAFYQLKKAPMQYLVILLLLLVSGEAIINTRAMVTGILDDWNYASRSLYSEPYPDLKNLVDQTKKENDTFYRLENLNGVSANDGINYGYSGISMFSSVRNRHSSTYLNALGFRSRGTNLNIRYQNNTLLMDALMGIKYNIAENNPMKFGFERQAAAGKYQLYRNENALPLGFLADKEIYNVRQPINDNLGSQTNLLNALANTNERYFTFYQPTMTLQNNVTITQNTAGVTFTEKQHNVAKEISYTVNVPANTQAYLSLFPTDFAQLESSTATVTVNGSSQQSQIGITGQYYNLGYYPKDTTVNFKVSFYGTKAVSFVQPQVVGLNTNAFEKAISAVQEKGVDLTTGKRSASGTFTADKDQVLVTTIPYDKGWRVK

SEQ ID NO: 127 - DNA, 2209 bp, Enterococcus faecalis
atgaaaaataaaagtaggcagtttttaaaaaacaactggccttatatgttagccagtttcttcattccatttttaattatggcaattatctatttgagtattgggatttatccaggaagtagtcgcagtgttttagccagcgatgccttttctcaattttcaaattttcacgcaagctttaacaatgttcttcatggaaaacaaagtcttttctatacgtggaatgcttctttgggactaaactacttgtccttaatttcctattatcttggtggcttatttacgccgctcgtctttttctttaacaatcaaaacatgcctgatgcgctctatttcctaacgttgttgaaaattgggagtgctggcttgagtttttggttcttggcaaaacaaacctttaagattcctaaatggtcccatgtgactttaagtgtgtcttatgcgctaatgtccttcattgtggcccattcagaattaattatgtggctggatgcctttatttatctgccactcgtaattttaggaattcatcgtttaatggaccaacgaaaaccgacattattgtttgtcagttatttcttgcttttcattacaaattattattttggctttatgattgggttgttttccttcctgtactattttgcacgaacgtttacagactggcaacgatataaatctcgaatcgttgcgtattttactacttctcttttagctggtggagcatccatgattatggtcttacctgctgtcttagatttacgaagcaatggtgaaactctttctgaaattacaacctttaaaacagaagcgactgcctttttagatattattatgaaaaatatgattggcgtttacgatacaaccaaatatgggtccattccttttatttacattgggttgttgcctttgattttttgtctcttctatttcgttacgaaagaaattccattgaaaaacaaactactttttggcagtttgtttgtcctattgattgctagcttttacatcacgcccttaaatttattctggcacggtatgcatgcgccgaacatgtttcttttccgctatagtttcctcttttcattcctagttattttgcttgctggttatggttgggaaaaatttgaaaaggatgatctcggcgtcttaagcggcttgattttgattcttttagcaatttttgctcttgcaatgggcacaaaaggtgctactagttatacgtatgtgactttaacctctttcgtattaacggcaacttttttactattatactttttcgggattgctttttatcaattgaaaaaagcgcctatgcaatacttagtgattttactattgctgctcgtttctggtgaagcaatcattaatacacgggcgatggtcactggtattttagatgattggaactacgcatcacgcagcttgtattctgagccttatcctgacttaaaaaatctagtcgatcaaacaaaaaaagaaaatgataccttttatcgcttggaaaatttaaatggtgtttcggccaatgacggcattaactatggctacagtggcattagcatgttttcttccgtacggaaccgacattcttcaacatacctaaacgccttaggtttccgctcgcgaggcacgaatttaaatattcgttaccaaaataataccttgttaatggatgctttgatgggcattaaatacaatattgctgaaaacaatccaatgaaattcggctttgagcgacaagcagctgctggtaaatatcagctttatcgtaacgaaaatgctttgccgttaggatttttagcagacaaagagatttacaatgtccggcaacctatcaatgataatttaggtagtcaaacaaatttactaaatgctttagccaataccaatgaacggtattttaccttttatcaaccaacgatgacgcttcaaaataacgtgacaattacgcaaaatacagctggcgtaacttttacggagaaacaacataacgtagccaaagagatttcttatacagtcaatgtgcccgccaatacgcaagcttatttgagtttattcccaacggattttgctcaattggaaagttccactgcgacggtcaccgtgaacggctcgagtcagcaatcacaaattggcattactggccaatattataatttaggctactatccaaaagatacaactgttaacttcaaagtaagttttt

SEQ ID NO: 128 - protein, 736 aa, Enterococcus faecalis
MKNKSRQFLKNNWPYMLASFFIPFLIMAIIYLSIGIYPGSSRSVLASDAFSQFSNFHASFNNVLHGKQSLFYTWNASLGLNYLSLISYYLGGLFTPLVFFFNNQNMPDALYFLTLLKIGSAGLSFWFLAKQTFKIPKWSHVTLSVSYALMSFIVAHSELIMWLDAFIYLPLVILGIHRLMDQRKPTLLFVSYFLLFITNYYFGFMIGLFSFLYYFARTFTDWQRYKSRIVAYFTTSLLAGGASMIMVLPAVLDLRSNGETLSEITTFKTEATAFLDIIMKNMIGVYDTTKYGSIPFIYIGLLPLIFCLFYFVTKEIPLKNKLLFGSLFVLLIASFYITPLNLFWHGMHAPNMFLFRYSFLFSFLVILLAGYGWEKFEKDDLGVLSGLILILLAIFALAMGTKGATSYTYVTLTSFVLTATFLLLYFFGIAFYQLKKAPMQYLVILLLLLVSGEAIINTRAMVTGILDDWNYASRSLYSEPYPDLKNLVDQTKKENDTFYRLENLNGVSANDGINYGYSGISMFSSVRNRHSSTYLNALGFRSRGTNLNIRYQNNTLLMDALMGIKYNIAENNPMKFGFERQAAAGKYQLYRNENALPLGFLADKEIYNVRQPINDNLGSQTNLLNALANTNERYFTFYQPTMTLQNNVTITQNTAGVTFTEKQHNVAKEISYTVNVPANTQAYLSLFPTDFAQLESSTATVTVNGSSQQSQIGITGQYYNLGYYPKDTTVNFKVSF

SEQ ID NO: 129 - DNA, 2058 bp, Enterococcus faecalis
atgaaaaataaaagtaggcagtttttaaaaaacaactggccttatatgttagccagtttcttcattccatttttaattatggcaattatctatttgagtattgggatttatccaggaagtagtcgcagtgttttagccagcgatgccttttctcaattttcaaattttcacgcaagctttaacaatgttcttcatggaaaacaaagtcttttctatacgtggaatgcttctttgggactaaactacttgtccttaatttcctattatcttggtggcttatttacgccgctcgtctttttctttaacaatcaaaacatgcctgatgcgctctatttcctaacgttgttgaaaattgggagtgctggcttgagtttttggttcttggcaaaacaaacctttaagattcctaaatggtcccatgtgactttaagtgtgtcttatgcgctaatgtccttcattgtggcccattcagaattaattatgtggctggatgcctttatttatctgccactcgtaattttaggaattcatcgtttaatggaccaacgaaaaccgacattattgtttgtcagttatttcttgcttttcattacaaattattattttggctttatgattgggttgttttccttcctgtactattttgcacgaacgtttacagactggcaacgatataaatctcgaatcgttgcgtattttactacttctcttttagctggtggagcatccatgattatggtcttacctgctgtcttagatttacgaaccaatggtgaaactctttctgaaattacaacctttaaaacagaagcgactgcctttttagatattattatgaaaaatatgattggcgtttacgatacaaccaaatatgggtccattccttttatttacattgggttgttgcctttgattttttgtctcttctatttcgttacgaaagaaattccattgaaaaacaaactactttttggcagtttgtttgtcctattgattgctagcttttacatcacgcccttaaatttattctggcacggtatgcatgcgccgaacatgtttcttttccgctatagtttcctcttttcattcctagttattttgcttgctggttatggttgggaaaaatttgaaaaggatgatctcggcgtcttaagcggcttgattttgattcttttagcaatttttgctcttgcaatgggcacaaaaggtgctactagttatacgtatgtgactttaacctctttcgtattaacggcaacttttttactattatactttttcgggattgctttttatcaattgaaaaaagcgcctatgcaatacttagtgattttactattgctgctcgtttctggtgaagcaatcattaatacacgagcgatggtcactggtattttagatgattggaactacgcatcacgcagcttgtattctgagccttaccctgacttaaaaaatctagtcgatcaaacaaaaaaagaaaatgataccttttatcgcttggaaaatttaaatggtgtttcggccaatgacggcattaactatggctacagtggcattagcatgttttcttccgtacggaaccgacattcttcaacatacctaaacgccttaggtttccgctcgcgaggcacgaatttaaatattcgttaccaaaataataccttgttaatggatgctttgatgggcattaaatacaatattgctgaaaacaatccaatgaaattcggctttgagcgacaagcagctgctggtaaatatcagctttatcgtaacgaaaatgctttgccgttaggatttttagcagacaaagagatttacaatgtccggcaacctatcaatgataatttaggtagtcaaacaaatttactaaatgctttagccaataccaatgaacggtattttaccttttatcaaccaacgatgacgcttcaaaataacgtgacaattacgcaaaatacagctggcgtaacttttacggagaaacaacataacgtagccaaagagatttcttatacaggcaatgcgcccgccaatacgcaagcttatttgagttta

SEQ ID NO: 130 - protein, 686 aa, Enterococcus faecalis
MKNKSRQFLKNNWPYMLASFFIPFLIMAIIYLSIGIYPGSSRSVLASDAFSQFSNFHASFNNVLHGKQSLFYTWNASLGLNYLSLISYYLGGLFTPLVFFFNNQNMPDALYFLTLLKIGSAGLSFWFLAKQTFKIPKWSHVTLSVSYALMSFIVAHSELIMWLDAFIYLPLVILGIHRLMDQRKPTLLFVSYFLLFITNYYFGFMIGLFSFLYYFARTFTDWQRYKSRIVAYFTTSLLAGGASMIMVLPAVLDLRTNGETLSEITTFKTEATAFLDIIMKNMIGVYDTTKYGSIPFIYIGLLPLIFCLFYFVTKEIPLKNKLLFGSLFVLLIASFYITPLNLFWHGMHAPNMFLFRYSFLFSFLVILLAGYGWEKFEKDDLGVLSGLILILLAIFALAMGTKGATSYTYVTLTSFVLTATFLLLYFFGIAFYQLKKAPMQYLVILLLLLVSGEAIINTRAMVTGILDDWNYASRSLYSEPYPDLKNLVDQTKKENDTFYRLENLNGVSANDGINYGYSGISMFSSVRNRHSSTYLNALGFRSRGTNLNIRYQNNTLLMDALMGIKYNIAENNPMKFGFERQAAAGKYQLYRNENALPLGFLADKEIYNVRQPINDNLGSQTNLLNALANTNERYFTFYQPTMTLQNNVTITQNTAGVTFTEKQHNVAKEISYTGNAPANTQAYLSL

SEQ ID NO: 131 - DNA, 2321 bp, Enterococcus faecalis
atgaaaaataaaagtaggcagtttttaaaaaacaactggccttatatgttagccagtttcttcattccatttttaattatggcaattatctatttgagtattgggatttatccaggaagtagtcgcagtgttttagccagcgatgccttttctcaattttcaaattttcacgcaagctttaacaatgttcttcatggaaaacaaagtcttttctatacgtggaatgcttctttgggactaaactacttgtccttaatttcctattatcttggtggcttatttacgccgctcgtctttttctttaacaatcaaaacatgcctgatgcgctctatttcctaacgttgttgaaaattgggagtgctggcttgagtttttggttcttggcaaaacaaacctttaagattcctaaatggtcccatgtgactttaagtgtgtcttatgcgctaatgtccttcattgtggcccattcagaattaattatgtggctggatgcctttatttatctgccactcgtaattttaggaattcatcgtttaatggaccaacgaaaaccgacattattgtttgtcagttatttcttgcttttcattacaaattattattttggctttatgattgggttgttttccttcctgtactattttgcacgaacgtttacagactggcaacgatataaatctcgaatcgttgcgtattttactacttctcttttagctggtggagcatccatgattatggtcttacctgctgtcttagatttacgaaccaatggtgaaactctttctgaaattacaacctttaaaacagaagcgactgcctttttagatattattatgaaaaatatgattggcgtttacgatacaaccaaatatgggtccattccttttatttacattgggttgttgcctttgattttttgtctcttctatttcgttacgaaagaaattccattgaaaaacaaactactttttggcagtttgtttgtcctattgattgctagcttttacatcacgcccttaaatttattctggcacggtatgcatgcgccgaacatgtttcttttccgctatagtttcctcttttcattcctagttattttgcttgctggttatggttgggaaaaatttgaaaaggatgatctcggcgtcttaagcggcttgattttgattcttttagcaatttttgctcttgcaatgggcacaaaaggtgctactagttatacgtttgtgactttaacctctttcgtattaacggcaacttttttactattatactttttcgggattgctttttatcaattgaaaaaagcgcctatgcaatacttagtgattttgttgttgctgctcgtttctggtgaagcaatcattaatacacgagcgatggtcactggtattttagatgattggaactacgcatcacgcagcttgtattctgagccttatcctgacttaaaaaatctagtcgatcaaacaaaaaaagaaaatgataccttttaccgcttggaaaatttaaatggtgtttcggccaatgacggcattaactatggctacagtggcattagcatgttttcttccgtacggaaccgacattcttcaacgtacctaaacgccttaggtttccgctcgcgaggcacgaatttaaatattcgttaccaaaataataccttgttaatggatgctttgatgggcattaaatacaatattgctgaaaacaatccaatgaaattcggctttgagcgacaagctgctgctggtaaatatcagctttatcgtaacgaaaatgctttgccgttaggatttttagcagacaaagagatttacaatgtccggcaacctctcaatgataatttaggtagtcaaacaaatttactaaatgctttagccaataccaatgaacggtattttaccttttatcaaccaacgatgacgcttcaaaataacgtgacaattacgcaaaatacagctggcgtaacttttacggagaaacaacataacgtagccaaagagatttcttatacagtcaatgtgcccgccaatacgcaagcttatttgagtttattcccaacggattttgctcaattggaaagttccactgcgacggtcaccgtgaacggctcgagtcagcaatcacaaattggcattactggccaatattataatttaggctactatccaaaagatacaactgttaacttcaaagtaagtttttatggaaccaaagcagtaagttttgttcagccgcaagtagttggcttaaataccaatgcatttgaaaaagccatttccgccgtgcaagaaaaaggcgttgatttaacaactgg

SEQ ID NO: 132 - protein, 774 aa, Enterococcus faecalis
MKNKSRQFLKNNWPYMLASFFIPFLIMAIIYLSIGIYPGSSRSVLASDAFSQFSNFHASFNNVLHGKQSLFYTWNASLGLNYLSLISYYLGGLFTPLVFFFNNQNMPDALYFLTLLKIGSAGLSFWFLAKQTFKIPKWSHVTLSVSYALMSFIVAHSELIMWLDAFIYLPLVILGIHRLMDQRKPTLLFVSYFLLFITNYYFGFMIGLFSFLYYFARTFTDWQRYKSRIVAYFTTSLLAGGASMIMVLPAVLDLRTNGETLSEITTFKTEATAFLDIIMKNMIGVYDTTKYGSIPFIYIGLLPLIFCLFYFVTKEIPLKNKLLFGSLFVLLIASFYITPLNLFWHGMHAPNMFLFRYSFLFSFLVILLAGYGWEKFEKDDLGVLSGLILILLAIFALAMGTKGATSYTFVTLTSFVLTATFLLLYFFGIAFYQLKKAPMQYLVILLLLLVSGEAIINTRAMVTGILDDWNYASRSLYSEPYPDLKNLVDQTKKENDTFYRLENLNGVSANDGINYGYSGISMFSSVRNRHSSTYLNALGFRSRGTNLNIRYQNNTLLMDALMGIKYNIAENNPMKFGFERQAAAGKYQLYRNENALPLGFLADKEIYNVRQPLNDNLGSQTNLLNALANTNERYFTFYQPTMTLQNNVTITQNTAGVTFTEKQHNVAKEISYTVNVPANTQAYLSLFPTDFAQLESSTATVTVNGSSQQSQIGITGQYYNLGYYPKDTTVNFKVSFYGTKAVSFVQPQVVGLNTNAFEKAISAVQEKGVDLTTG

SEQ ID NO: 133 - DNA, 2286 bp, Enterococcus faecalis
atgaaaaataaaagtaggcagtttttaaaaaacaactggccttatatgttagccagtttcttcattccatttttaattatggcaattatctatttgagtattgggatttatccaggaagtagtcgcagtgttttagccagcgatgccttttctcaattttcaaattttcacgcaagctttaacaatgttcttcatggaaaacaaagtcttttctatacgtggaatgcttctttgggactaaactacttgtccttaatttcctattatcttggtggcttatttacgccgctcgtctttttctttaacaatcaaaacatgcctgatgcgctctatttcctaacgttgttgaaaattgggagtgctggcttgagtttttggttcttggcaaaacaaacctttaagattcctaaatggtcccatgtgactttaagtgtgtcttatgcgctaatgtccttcattgtggcccattcagaattaattatgtggctggatgcctttatttatctgccactcgtaattttaggaattcatcgtttaatggaccaacgaaaaccgacattattgtttgtcagttatttcttgcttttcattacaaattattattttggctttatgattgggttgttttccttcctgtactattttgcacgaacgtttacagactggcaacgatataaatctcgaatcgttgcgtattttactacttctcttttagctggtggagcatccatgattatggtcttacctgctgtcttagatttacgaaccaatggtgaaactctttctgaaattacaacctttaaaacagaagcgactgcctttttagatattattatgaaaaatatgattggcgtttacgatacaaccaaatatgggtccattccttttatttacattgggttgttgcctttgattttttgtctcttctatttcgttacgaaagaaattccattgaaaaacaaactactttttggcagtttgtttgtcctattgattgctagcttttacatcacgcccttaaatttattctggcacggtatgcatgcgccgaacatgtttcttttccgctatagtttcctcttttcattcctagttattttgcttgctggttatggttgggaaaaatttgaaaaggatgatctcggcgtcttaagcggcttgattttgattcttttagcaatttttgctcttgcaatgggcacaaaaggtgctactagttatacgtatgtgactttaacctctttcgtattaacggcaacttttttactattatactttttcgggattgctttttatcaattgaaaaaagcgcctatgcaatacttagtgattttactattgctgctcgtttctggtgaagcaatcattaatacacgagcgatggtcactggtattttagatgattggaactacgcatcacgcagcttgtattctgagccttaccctgacttaaaaaatctagtcgatcaaacaaaaaaagaaaatgataccttttatcgcttggaaaatttaaatggtgtttcggccaatgacggcattaactatggctacagtggcattagcatgttttcttccgtacggaaccgacattcttcaacatacctaaacgccttaggtttccgctcgcgaggcacgaatttaaatattcgttaccaaaataataccttgttaatggatgctttgatgggcattaaatacaatattgctgaaaacaatccaatgaaattcggctttgagcgacaagcagctgctggtaaatatcagctttatcgtaacgaaaatgctttgccgttaggatttttagcagacaaagagatttacaatgtccggcaacctatcaatgataatttaggtagtcaaacaaatttactaaatgctttagccaataccaatgaacggtattttaccttttatcaaccaacgatgacgcttcaaaataacgtgacaattacgcaaaatacagctggcgtaacttttacggagaaacaacataacgtagccaaagagatttcttatacagtcaatgtgcccgccaatacgcaagcttatttgagtttattcccaacggattttgctcaattggaaagttccactgcgacggtcaccgtgaacggctcgagtcagcaatcacaaattggcattactggccaatattataatttaggctactatccaaaagatacaactgttaacttcaaagtaagtttttatggaaccaaagcagtaagttttgttcagccgcaagtagttggcttaaataccaatgcatttgaaaaagccatttcc

SEQ ID NO: 134 - protein, 762 aa, Enterococcus faecalis
MKNKSRQFLKNNWPYMLASFFIPFLIMAIIYLSIGIYPGSSRSVLASDAFSQFSNFHASFNNVLHGKQSLFYTWNASLGLNYLSLISYYLGGLFTPLVFFFNNQNMPDALYFLTLLKIGSAGLSFWFLAKQTFKIPKWSHVTLSVSYALMSFIVAHSELIMWLDAFIYLPLVILGIHRLMDQRKPTLLFVSYFLLFITNYYFGFMIGLFSFLYYFARTFTDWQRYKSRIVAYFTTSLLAGGASMIMVLPAVLDLRTNGETLSEITTFKTEATAFLDIIMKNMIGVYDTTKYGSIPFIYIGLLPLIFCLFYFVTKEIPLKNKLLFGSLFVLLIASFYITPLNLFWHGMHAPNMFLFRYSFLFSFLVILLAGYGWEKFEKDDLGVLSGLILILLAIFALAMGTKGATSYTYVTLTSFVLTATFLLLYFFGIAFYQLKKAPMQYLVILLLLLVSGEAIINTRAMVTGILDDWNYASRSLYSEPYPDLKNLVDQTKKENDTFYRLENLNGVSANDGINYGYSGISMFSSVRNRHSSTYLNALGFRSRGTNLNIRYQNNTLLMDALMGIKYNIAENNPMKFGFERQAAAGKYQLYRNENALPLGFLADKEIYNVRQPINDNLGSQTNLLNALANTNERYFTFYQPTMTLQNNVTITQNTAGVTFTEKQHNVAKEISYTVNVPANTQAYLSLFPTDFAQLESSTATVTVNGSSQQSQIGITGQYYNLGYYPKDTTVNFKVSFYGTKAVSFVQPQVVGLNTNAFEKAIS

SEQ ID NO: 135 - DNA, 2616 bp, Enterococcus faecalis; identical to SEQ ID NO: 45

SEQ ID NO: 136 - protein, 871 aa, Enterococcus faecalis; identical to SEQ ID NO: 65

SEQ ID NO: 137 - DNA, 2616 bp, Enterococcus faecalis
atgaaaaataaaagtaggcagtttttaaaaaacaactggccttatatgttagccagtttcttcattccatttttaattatggcaattatctatttgagtattgggatttatccaggaagtagtcgcagtgttttagccagcgatgccttttctcaattttcaaattttcacgcaagctttaacaatgttcttcatggaaaacaaagtcttttctatacgtggaatgcttctttgggactaaactacttgtccttaatttcctattatcttggtggcttatttacgccgctcgtctttttctttaacaatcaaaacatgcctgatgcgctctatttcctaacgttgttgaaaattgggagtgctggcttgagtttttggttcttggcaaaacaaacctttaagattcctaaatggtcccatgtgactttaagtgtgtcttatgcgctaatgtccttcattgtggcccattcagaattaattatgtggctggatgcctttatttatctgccactcgtaattttaggaattcatcgtttaatggaccaacgaaaaccgacattattgtttgtcagttatttcttgcttttcattacaaattattattttggctttatgattgggttgttttccttcctgtactattttgcacgaacgtttacagactggcaacgatataaatctcgaatcgttgcgtattttactacttctcttttagctggtggagcatccatgattatggtcttacctgctgtcttagatttacgaaccaatggtgaaactctttctgaaattacaacctttaaaacagaagcgactgcctttttagatattattatgaaaaatatgattggcgtttacgatacaaccaaatatgggtccattccttttatttacattgggttgttgcctttgattttttgtctcttctatttcgttacgaaagaaattccattgaaaaacaaactactttttggcagtttgtttgtcctattgattgctagcttttacatcacgcccttaaatttattctggcacggtatgcatgcgccgaacatgtttcttttccgctatagtttcctcttttcattcctagttattttgcttgctggttatggttgggaaaaatttgaaaaggatgatctcggcgtcttaagcggcttgattttgattcttttagcaatttttgctcttgcaatgggcacaaaaggtgctactagttatacgtatgtgactttaacctctttcgtattaacggcaacttttttgctattatactttttcgggattgctttttatcaattgaaaaaagcgcctatgcaatacttagtgattttgttattgctgctcgtttctggtgaagcaatcattaatacacgggcgatggtcactggtattttagatgattggaactacgcatcacgtagtttgtattctgaaccttatcctgacttaaaaaatctagtcgatcaaacaaaaaaagaaaatgataccttttaccgcttggaaaatttaaatggtgtttcggccaatgacggcattaactatggctacagtggcattagcatgttttcttccgtacggaaccgacattcttcaacatacctaaacgccttaggtttccgctcacgaggcacgaatttaaatattcgttaccaaaataataccttgttaatggatgctttgatgggcattaaatacaatattgctgaaaataatccaatgaaattcggctttgaacgacaagctgctgctggtaaatatcagctttatcgtaacgaaaatgctttgccgttaggatttttagcagacaaagagatttacaatgttcggcaacctctcaatgataatttaggtagtcaaacaaatttactaaatgctttagccaataccaatgaacggtattttaccttttatcaaccaacgatgacgcttcaaaataacgtgacaattacgcaaaatacagctggcgtaacttttacggagaaacaacataacgtagccaaagagatttcttatacagtcaatgtgcccgccaatacgcaagcttatttgagtttattcccaacggattttgctcaattggaaagttccactgcgacggtcaccgtgaacggctcgagtcagcaatcacaaattggcattactggccaatattataatttaggctactatccaaaagatacaaccgttaacttcaaagtaagtttttatggaaccaaagcagtaagttttgttcagccgcaagtggttggcttaaataccaatgcatttgaaaaagccatttccgccgtgcaagaaaaaggcgttgatttaacaactggcaaacgctctgcttcaggtacctttaccgccgacaaagatcaagtactcgtcactacaattccttatgacaaaggttggcgtgtcaaaattgatggcaaaaaagttaccccaaaagcctttaaagatgcctttctaagcgttcctatcagcgttggaacccatactattcagttctcttatttaccagaaggattgattcctggcatcgtgttattcgttctatgtactggtggtttcgttgcctacgtaaccttgattccagctagacgaaaccgtaaaaaagaagacaaataa

SEQ ID NO: 138 - protein, 871 aa, Enterococcus faecalis
MKNKSRQFLKNNWPYMLASFFIPFLIMAIIYLSIGIYPGSSRSVLASDAFSQFSNFHASFNNVLHGKQSLFYTWNASLGLNYLSLISYYLGGLFTPLVFFFNNQNMPDALYFLTLLKIGSAGLSFWFLAKQTFKIPKWSHVTLSVSYALMSFIVAHSELIMWLDAFIYLPLVILGIHRLMDQRKPTLLFVSYFLLFITNYYFGFMIGLFSFLYYFARTFTDWQRYKSRIVAYFTTSLLAGGASMIMVLPAVLDLRTNGETLSEITTFKTEATAFLDIIMKNMIGVYDTTKYGSIPFIYIGLLPLIFCLFYFVTKEIPLKNKLLFGSLFVLLIASFYITPLNLFWHGMHAPNMFLFRYSFLFSFLVILLAGYGWEKFEKDDLGVLSGLILILLAIFALAMGTKGATSYTYVTLTSFVLTATFLLLYFFGIAFYQLKKAPMQYLVILLLLLVSGEAIINTRAMVTGILDDWNYASRSLYSEPYPDLKNLVDQTKKENDTFYRLENLNGVSANDGINYGYSGISMFSSVRNRHSSTYLNALGFRSRGTNLNIRYQNNTLLMDALMGIKYNIAENNPMKFGFERQAAAGKYQLYRNENALPLGFLADKEIYNVRQPLNDNLGSQTNLLNALANTNERYFTFYQPTMTLQNNVTITQNTAGVTFTEKQHNVAKEISYTVNVPANTQAYLSLFPTDFAQLESSTATVTVNGSSQQSQIGITGQYYNLGYYPKDTTVNFKVSFYGTKAVSFVQPQVVGLNTNAFEKAISAVQEKGVDLTTGKRSASGTFTADKDQVLVTTIPYDKGWRVKIDGKKVTPKAFKDAFLSVPISVGTHTIQFSYLPEGLIPGIVLFVLCTGGFVAYVTLIPARRNRKKEDK

SEQ ID NO: 139 - DNA, 2616 bp, Enterococcus faecalis
atgaaaaataaaagtaggcagtttttaaaaaacaactggccttatatgttagccagtttcttcattccatttttaattatggcaattatctatttgagtattgggatttatccaggaagtagtcgcagtgttttagccagcgatgccttttctcaattttcaaattttcacgcaagctttaacaatgttcttcatggaaaacaaagtcttttctatacgtggaatgcttctttgggactaaactacttgtccttaatttcctattatcttggtggcttatttacgccgctcgtctttttctttaacaatcaaaacatgcctgatgcgctctatttcctaacgttgttgaaaattgggagtgctggcttgagtttttggttcttggcaaaacaaacctttaagattcctaaatggtcccatgtgactttaagtgtgtcttatgcgctaatgtccttcattgtggcccattcagaattaattatgtggctggatgcctttatttatctgccactcgtaattttaggaattcatcgtttaatggaccaacgaaaaccgacattattgtttgtcagttatttcttgcttttcattacaaattattattttggctttatgattgggttgttttccttcctgtactattttgcacgaacgtttacagactggcaacgatataaatctcgaatcgttgcgtattttactacttctcttttagctggtggagcatccatgattatggttttacctgctgtcttagatttacgaaccaatggtgaaactctttctgaaattacaacctttaaaacagaagcgactgcctttttagatattattatgaaaaatatgattggcgtttacgatacaaccaaatatgggtccattccttttatttacattgggttgttgcctttgattttttgtctcttctatttcgttacgaaagaagttccattgaaaaacaaactactttttggcagtttgtttgtcctattgattgctagcttttacatcacgcccttaaatttattctggcacggtatgcatgcgccgaacatgtttcttttccgctatagtttcctcttttcattcctagttattttgcttgctggttatggttgggaaaaatttgaaaaggatgatctcggcgtcttaagcggcttgattttgattcttttagcaatttttgctcttgcaatgggcacaaaaggtgctactagttatacgtatgtgactttaacctctttcgtattaacggcaacttttttactattatactttttcggaattgctttttatcaattgaaaaaagcgcctatgcaatacttagtgattttgttattgctgctcgtttctggtgaagcaatcattaatacacgggcgatggtcactggtattttagatgattggaactacgcatcacgcagcttgtattctgagccttatcctgacttaaaaaatctagtcgatcaaacaaaaaaagaaaatgataccttttatcgcttggaaaatttaaatggtgtttcggccaatgacggcattaactatggctacagtggcattagcatgttttcttccgtacggaaccgacattcttcaacatacctaaacgccttaggtttccgctcgcgaggcacgaatttaaatattcgttaccaaaataataccttgttaatggatgctttgatgggcattaaatacaatattgctgaaaacaatccaatgaaattcggctttgagcgacaagcagctgctggtaaatatcagctttatcgtaacgaaaatgctttgccgttaggatttttagcagacaaagagatttacaatgttcggcaacctctcaatgataatttaggtagtcaaacaaatttactaaatgctttagccaataccaatgaacggtattttaccttttatcaaccaacgatgacgcttcaaaataacgtgacaattacgcaaaatacagctggcgtaacttttacggagaaacaacataacgtagccaaagagatttcttatacagtcaatgtgcccgccaatacgcaagcttatttgagtttattcccaacggattttgctcaattggaaagttccactgcgacggtcaccgtgaacggctcgagtcagcaatcacaaattggcattactggccaatattataatttaggctactatccaaaagatacaactgttaacttcaaagtaagtttttatggaaccaaagcagtaagttttgttcagccgcaagtagttggcttaaataccaatgcatttgaaaaagccatttccgccgtgcaagaaaaaggcgttgatttaaccactggcaaacgctctgcttcaggtacctttaccgcggacaaagatcaagtactcgtcactacaattccttatgacaaaggttggcgtgtcaaaattgatggcaaaaaagttaccccaaaagcctttaaagatgcctttctaagcgttcctgtcagcgctggaacccatactattcagttctcttatttaccagagggattgattcctggcatcgtgttattcgttctatgtactggtggtttcgttgcctacgtaaccttgattcctgctagacgaaaccgtaaaaaagaagacatataa

SEQ ID NO: 140 - protein, 871 aa, Enterococcus faecalis
MKNKSRQFLKNNWPYMLASFFIPFLIMAIIYLSIGIYPGSSRSVLASDAFSQFSNFHASFNNVLHGKQSLFYTWNASLGLNYLSLISYYLGGLFTPLVFFFNNQNMPDALYFLTLLKIGSAGLSFWFLAKQTFKIPKWSHVTLSVSYALMSFIVAHSELIMWLDAFIYLPLVILGIHRLMDQRKPTLLFVSYFLLFITNYYFGFMIGLFSFLYYFARTFTDWQRYKSRIVAYFTTSLLAGGASMIMVLPAVLDLRTNGETLSEITTFKTEATAFLDIIMKNMIGVYDTTKYGSIPFIYIGLLPLIFCLFYFVTKEVPLKNKLLFGSLFVLLIASFYITPLNLFWHGMHAPNMFLFRYSFLFSFLVILLAGYGWEKFEKDDLGVLSGLILILLAIFALAMGTKGATSYTYVTLTSFVLTATFLLLYFFGIAFYQLKKAPMQYLVILLLLLVSGEAIINTRAMVTGILDDWNYASRSLYSEPYPDLKNLVDQTKKENDTFYRLENLNGVSANDGINYGYSGISMFSSVRNRHSSTYLNALGFRSRGTNLNIRYQNNTLLMDALMGIKYNIAENNPMKFGFERQAAAGKYQLYRNENALPLGFLADKEIYNVRQPLNDNLGSQTNLLNALANTNERYFTFYQPTMTLQNNVTITQNTAGVTFTEKQHNVAKEISYTVNVPANTQAYLSLFPTDFAQLESSTATVTVNGSSQQSQIGITGQYYNLGYYPKDTTVNFKVSFYGTKAVSFVQPQVVGLNTNAFEKAISAVQEKGVDLTTGKRSASGTFTADKDQVLVTTIPYDKGWRVKIDGKKVTPKAFKDAFLSVPVSAGTHTIQFSYLPEGLIPGIVLFVLCTGGFVAYVTLIPARRNRKKEDI

SEQ ID NO: 141 - DNA, 2616 bp, Enterococcus faecalis
atgaaaaataaaagtaggcagtttttaaaaaacaactggccttatatgttagccagtttcttcattccatttttaattatggcaattatctatttgagtattgggatttatccaggaagtagtcgcagtgttttagccagcgatgccttttctcaattttcaaattttcacgcaagctttaacaatgttcttcatggaaaacaaagtcttttctatacgtggaatgcttctttgggactaaactacttgtccttaatttcctattatcttggtggcttatttacgccgctcgtctttttctttaacaatcaaaacatgcctgatgcgctctatttcctaacgttgttgaaaattgggagtgctggcttgagtttttggttcttggcaaaacaaacctttaagattcctaaatggtcccatgtgactttaagtgtgtcttatgcgctaatgtccttcattgtggcccattcagaattaattatgtggctggatgcctttatttatctgccactcgtaattttaggaattcatcgtttaatggaccaacgaaaaccgacattattgtttgtcagttatttcttgcttttcattacaaattattattttggctttatgattgggttgttttccttcctgtactattttgcacgaacgtttacagactggcaacgatataaatctcgaatcgttgcgtattttactacttctcttttagctggtggagcatccatgattatggtcttacctgctgtcttagatttacgaaccaatggtgaaactctttctgaaattacaacctttaaaacagaagcgactgcctttttagatattattatgaaaaatatgattggcgtttacgatacaaccaaatatgggtccattccttttatttacattgggttgttgcctttgattttttgtctcttctatttcgttacgaaagaagttccattgaaaaacaaactactttttggcagtttgtttgtcctattgattgctagcttttacatcacgcccttaaatttattctggcacggtatgcatgcgccgaacatgtttcttttccgctatagtttcctcttttcattcctagttattttgcttgctggttatggttgggaaaaatttgaaaaggatgatctcggcgtcttaagcggcttgattttgattcttttagcaatttttgctcttgcaatgggcacaaaaggtgctactagttatacgtatgtgactttaacctctttcgtattaacggcaacttttttactattatactttttcgggattgctttttatcaattgaaaaaagcgcctatgcaatacttagtgattttgttattactgctcgtttctggtgaagcaatcattaatacacgggcgatggtcactggtattttagatgattggaactacgcatcacgcagcttgtattctgagccttaccctgacttaaaaaatctagtcgatcaaacaaaaaaagaaaatgataccttttatcgcttggaaaatttaaatggtgtttcggccaatgacggcattaactatggctacagtggcattagcatgttttcttccgtacggaaccgacattcttcaacatacctaaacgccttaggtttccgctcgcgaggcacgaatttaaatattcgttaccaaaataataccttgttaatggatgctttgatgggcattaaatacaatattgctgaaaacaatccaatgaaattcggctttgagcgacaagcagctgctggtaaatatcagctttatcgtaacgaaaatgctttgccgttaggatttttagcagacaaagagatttacaatgtccggcaacctatcaatgataatttaggtagtcaaacaaatttactaaatgctttagccaataccaatgaacggtattttaccttttatcaaccaacgatgacgcttcaaaataacgtgacaattacgcaaaatatagctggcgtaacttttacggagaaacaacataacgtagccaaagagatttcttatacagtcaatgtgcccgccaatacgcaagcttatttgagtttattcccaacggattttgctcaattggaaagttccactgcgacggtcaccgtgaacggctcgagtcagcaatcacaaattggcattactggccaatattataatttaggctactatccaaaagatacaactgttaacttcaaagtaagtttttatggaaccaaagcagtaagttttgttcagccgcaagtagttggcttaaataccaatgcatttgaaaaagccatttccgccgtgcaagaaaaaggcgttgatttaaccactggcaaacgctctgcttcaggtacctttaccgccgacaaagatcaagtactcgtcactacaattccttatgacaaaggttggcgtgtcaaaattgatagcaaaaaagttaccccaaaagcatttaaagatgcctttctaagcgttcctgtcagcgctggaacccatactattcagttctcttatttaccagaaggattgattcctggcatcgtgttattcgttctatgtactggtggtttcgttgcctacgtaaccttgattcctgctagacgaaaccgtaaaaaagaagacaaataa

SEQ ID NO: 142 - protein, 871 aa, Enterococcus faecalis
MKNKSRQFLKNNWPYMLASFFIPFLIMAIIYLSIGIYPGSSRSVLASDAFSQFSNFHASFNNVLHGKQSLFYTWNASLGLNYLSLISYYLGGLFTPLVFFFNNQNMPDALYFLTLLKIGSAGLSFWFLAKQTFKIPKWSHVTLSVSYALMSFIVAHSELIMWLDAFIYLPLVILGIHRLMDQRKPTLLFVSYFLLFITNYYFGFMIGLFSFLYYFARTFTDWQRYKSRIVAYFTTSLLAGGASMIMVLPAVLDLRTNGETLSEITTFKTEATAFLDIIMKNMIGVYDTTKYGSIPFIYIGLLPLIFCLFYFVTKEVPLKNKLLFGSLFVLLIASFYITPLNLFWHGMHAPNMFLFRYSFLFSFLVILLAGYGWEKFEKDDLGVLSGLILILLAIFALAMGTKGATSYTYVTLTSFVLTATFLLLYFFGIAFYQLKKAPMQYLVILLLLLVSGEAIINTRAMVTGILDDWNYASRSLYSEPYPDLKNLVDQTKKENDTFYRLENLNGVSANDGINYGYSGISMFSSVRNRHSSTYLNALGFRSRGTNLNIRYQNNTLLMDALMGIKYNIAENNPMKFGFERQAAAGKYQLYRNENALPLGFLADKEIYNVRQPINDNLGSQTNLLNALANTNERYFTFYQPTMTLQNNVTITQNIAGVTFTEKQHNVAKEISYTVNVPANTQAYLSLFPTDFAQLESSTATVTVNGSSQQSQIGITGQYYNLGYYPKDTTVNFKVSFYGTKAVSFVQPQVVGLNTNAFEKAISAVQEKGVDLTTGKRSASGTFTADKDQVLVTTIPYDKGWRVKIDSKKVTPKAFKDAFLSVPVSAGTHTIQFSYLPEGLIPGIVLFVLCTGGFVAYVTLIPARRNRKKEDK

SEQ ID NO: 143 - DNA, 2416 bp, Enterococcus faecalis
atgaaaaataaaagtaggcagtttttaaaaaacaactggccttatatgttagccagtttcttcattccatttttaattatggcaattatctatttgagtattgggatttatccaggaagtagtcgcagtgttttagccagcgatgccttttctcaattttcaaattttcacgcaagctttaacaatgttcttcatggaaaacaaagtcttttctatacgtggaatgcttctttgggactaaactacttgtccttaatttcctattatcttggtggcttatttacgccgctcgtctttttctttaacaatcaaaacatgcctgatgcgctctatttcctaacgttgttgaaaattgggagtgctggcttgagtttttggttcttggcaaaacaaacctttaagattcctaaatggtcccatgtgactttaagtgtgtcttatgcgctaatgtccttcattgtggcccattcagaattaattatgtggctggatgcctttatttatctgccactcgtaattttaggaattcatcgtttaatggaccaacgaaaaccgacattattgtttgtcagttatttcttgcttttcattacaaattattattttggctttatgattgggttgttttccttcctgtactattttgcacgaacgtttacagactggcaacgatataaatctcgaatcgttgcgtattttactacttctcttttagctggtggagcatccatgattatggtcttacctgctgtcttagatttacgaaccaatggtgaaactctttctgaaattacaacctttaaaacagaagcgactgcctttttagatattattatgaaaaatatgattggcgtttacgatacaaccaaatatgggtccattccttttatttacattgggttgttgcctttgattttttgtctcttctatttcgttacgaaagaaattccattgaaaaacaaactactttttggcagtttgtttgtcctattgattgctagcttttacatcacgcccttaaatttattctggcacggtatgcatgcgccgaacatgtttcttttccgctatagtttcctcttttcattcctagttattttgcttgctggttatggttgggaaaaatttgaaaaggatgatctcggcgtcttaagcggcttgattttgattcttttagcaatttttgctcttgcaatgggcacaaaaggtgctactagttatacgtatgtgactttaacctctttcgtattaacggcaacttttttactattatactttttcgggattgctttttatcaattgaaaaaagcgcctatgcaatacttagtgattttactattgctgctcgtttctggtgaagcaatcattaatacacgggcgatggtcactggtattttagatgattggaactacgcatcacgcagcttgtattctgagccttaccctgacttaaaaaatctagtcgatcaaacaaaaaaagaaaatgataccttttatcgcttggaaaatttaaatggtgtttcggccaatgacggcattaactatggctacagtggcattagcatgttttcttccgtgcggaaccgacattcttcaacgtacctaaacgccttaggtttccgctcgcgaggcacgaatttaaatattcgttaccaaaataataccttgttaatggatgctttgatgggcattaaatacaatattgctgaaaataatccaatgaaattcggctttgaacgacaagctgctgctggtaaatatcagctttatcgtaacgaaaatgctttgccgttaggatttttagcagacaaagagatttacaatgtccggcaacctctcaatgataatttaggtagtcaaacaaatttactaaatgctttagccaataccaatgaacggtattttaccttttatcaaccaacgatgacgcttcaaaataacgtgacaattacgcaaaatacagctggcgtaacttttacggagaaacaacataacgtagccaaagagatttcttatacagtcaatgtgcccgccaatacgcaagcttatttgagtttattcccaacggattttgctcaattggaaagttccactgcgacggtcaccgtgaacggctcaagtcagcaatcacaaattggcattactggccaatattataatttaggctactatccaaaagatacaactgttaacttcaaagtaagtttttatggaaccaaagcagtaagttttgttcagccgcaagtagttggcttaaataccaatgcatttgaaaaagccatttccgccgtgcaagaaaaaggcgttgatttaaccactggcaaacgctctgcttcaggtacctttaccgccgacaaagatcaagtactcgtcactacaattccttatgacaaaggttggcgtgtcaaaattgatg

SEQ ID NO: 144 - protein, 805 aa, Enterococcus faecalis
MKNKSRQFLKNNWPYMLASFFIPFLIMAIIYLSIGIYPGSSRSVLASDAFSQFSNFHASFNNVLHGKQSLFYTWNASLGLNYLSLISYYLGGLFTPLVFFFNNQNMPDALYFLTLLKIGSAGLSFWFLAKQTFKIPKWSHVTLSVSYALMSFIVAHSELIMWLDAFIYLPLVILGIHRLMDQRKPTLLFVSYFLLFITNYYFGFMIGLFSFLYYFARTFTDWQRYKSRIVAYFTTSLLAGGASMIMVLPAVLDLRTNGETLSEITTFKTEATAFLDIIMKNMIGVYDTTKYGSIPFIYIGLLPLIFCLFYFVTKEIPLKNKLLFGSLFVLLIASFYITPLNLFWHGMHAPNMFLFRYSFLFSFLVILLAGYGWEKFEKDDLGVLSGLILILLAIFALAMGTKGATSYTYVTLTSFVLTATFLLLYFFGIAFYQLKKAPMQYLVILLLLLVSGEAIINTRAMVTGILDDWNYASRSLYSEPYPDLKNLVDQTKKENDTFYRLENLNGVSANDGINYGYSGISMFSSVRNRHSSTYLNALGFRSRGTNLNIRYQNNTLLMDALMGIKYNIAENNPMKFGFERQAAAGKYQLYRNENALPLGFLADKEIYNVRQPLNDNLGSQTNLLNALANTNERYFTFYQPTMTLQNNVTITQNTAGVTFTEKQHNVAKEISYTVNVPANTQAYLSLFPTDFAQLESSTATVTVNGSSQQSQIGITGQYYNLGYYPKDTTVNFKVSFYGTKAVSFVQPQVVGLNTNAFEKAISAVQEKGVDLTTGKRSASGTFTADKDQVLVTTIPYDKGWRVKID

SEQ ID NO: 145 - DNA, 1923 bp, Enterococcus faecalis
tccatgattatggtcttacctgctgtcttagatttacgaaccaatggtgaaactctttctgaaattacaacctttaaaacagaagcgactgcctttttagatattattatgaaaaatatgattggcgtttacgatacaaccaaatatgggtccattccttttatttacattgggttgttgcctttgattttttgtctcttctatttcgttacgaaagaaattccattgaaaaacaaactactttttggcagtttgtttgtcctattgattgctagcttttacatcacgcccttaaatttattctggcacggtatgcatgcgccgaacatgtttcttttccgctatagtttcctcttttcattcctagttattttgcttgctggttatggttgggaaaaatttgaaaaggatgatctcggcgtcttaagcggcttgattttgattcttttagcaatttttgctcttgcaatgggcacaaaaggtgctactagttatacgtatgtgactttaacctctttcgtattaacggcaacttttttactattatactttttcgggattgctttttatcaattgaaaaaagcgcctatgcaatacttagtgattttactattgctgctcgtttctggtgaagcaatcattaatacacgggcgatggtcactggtattttagatgattggaactacgcatcacgcagcttgtattctgagccttaccctgacttaaaaaatctagtcgatcaaacaaaaaaagaaaatgataccttttatcgcttggaaaatttaaatggtgtttcggccaatgacggcattaactatggctacagtggcattagcatgttttcttccgtgcggaaccgacattcttcaacgtacctaaacgccttaggtttccgctcgcgaggcacgaatttaaatattcgttaccaaaataataccttgttaatggatgctttgatgggcattaaatacaatattgctgaaaataatccaatgaaattcggctttgaacgacaagctgctgctggtaaatatcagctttatcgtaacgaaaatgctttgccgttaggatttttagcagacaaagagatttacaatgtccggcaacctctcaatgataatttaggtagtcaaacaaatttactaaatgctttagccaataccaatgaacggtattttaccttttatcaaccaacgatgacgcttcaaaataacgtgacaattacgcaaaatacagctggcgtaacttttacggagaaacaacataacgtagccaaagagatttcttatacagtcaatgtgcccgccaatacgcaagcttatttgagtttattcccaacggattttgctcaattggaaagttccactgcgacggtcaccgtgaacggctcaagtcagcaatcacaaattggcattactggccaatattataatttaggctactatccaaaagatacaactgttaacttcaaagtaagtttttatggaaccaaagcagtaagttttgttcagccgcaagtagttggcttaaataccaatgcatttgaaaaagccatttccgccgtgcaagaaaaaggcgttgatttaaccactggcaaacgctctgcttcaggtacctttaccgccgacaaagatcaagtactcgtcactacaattccttatgacaaaggttggcgtgtcaaaattgatggcaaaaaagttaccccaaaagcctttaaagaggcctttctaagcgttcctgtcagcgctggaacccatactattcaattctcttatttaccagaaggattgattcctggcatcgtgttattcgttctatgtactggtagtttcgttgcctacgtaaccttgattcctgctagacgaaaccgtaaaaacgaagacatagaattctttccaaaactaagggtattaataaaatga

SEQ ID NO: 146 - protein, 640 aa, Enterococcus faecalis
SMIMVLPAVLDLRTNGETLSEITTFKTEATAFLDIIMKNMIGVYDTTKYGSIPFIYIGLLPLIFCLFYFVTKEIPLKNKLLFGSLFVLLIASFYITPLNLFWHGMHAPNMFLFRYSFLFSFLVILLAGYGWEKFEKDDLGVLSGLILILLAIFALAMGTKGATSYTYVTLTSFVLTATFLLLYFFGIAFYQLKKAPMQYLVILLLLLVSGEAIINTRAMVTGILDDWNYASRSLYSEPYPDLKNLVDQTKKENDTFYRLENLNGVSANDGINYGYSGISMFSSVRNRHSSTYLNALGFRSRGTNLNIRYQNNTLLMDALMGIKYNIAENNPMKFGFERQAAAGKYQLYRNENALPLGFLADKEIYNVRQPLNDNLGSQTNLLNALANTNERYFTFYQPTMTLQNNVTITQNTAGVTFTEKQHNVAKEISYTVNVPANTQAYLSLFPTDFAQLESSTATVTVNGSSQQSQIGITGQYYNLGYYPKDTTVNFKVSFYGTKAVSFVQPQVVGLNTNAFEKAISAVQEKGVDLTTGKRSASGTFTADKDQVLVTTIPYDKGWRVKIDGKKVTPKAFKEAFLSVPVSAGTHTIQFSYLPEGLIPGIVLFVLCTGSFVAYVTLIPARRNRKNEDIEFFPKLRVLIK

SEQ ID NO: 147 - DNA, 2248 bp, Enterococcus faecalis
atgaaaaataaaagtaggcagtttttaaaaaacaactggccttatatgttagccagtttcttcattccatttttaattatggcaattatctatttgagtattgggatttatccaggaagtagtcgcagtgttttagccagcgatgccttttctcaattttcaaattttcacgcaagctttaacaatgttcttcatggaaaacaaagtcttttctatacatggaatgcttctttgggactaaactacttgtccttaatttcctattatcttggtggcttatttacgccgctcgtctttttctttaacaatcaaaacatgcctgatgcgctctatttcctaacgttgttgaaaattgggagtgctggcttgagtttttggttcttggcaaaacaaacctttaagattcctaaatggtcccatgtgactttaagtgtgtcttatgcgctaatgtccttcattgtggcccattcagaattaattatgtggctggatgcctttatttatctgccactcgtaattttaggaattcatcgtttaatggaccaacgaaaaccgacattattgtttgtcagttatttcttgcttttcattacaaattattattttggctttatgattgggttgttttccttcctgtactattttgcacgaacgtttacagactggcaacgatataaatctcgaatcgttgcgtattttactacttctcttttagctggtggagcatccatgattatggtcttacctgctgtcttagatttacgaaccaatggtgaaactctttctgaaattacaacctttaaaacagaagcgactgcctttttagatattattatgaaaaatatgattggcgtttacgatacaaccaaatatgggtccattccttttatttacattgggttgttgcctttgattttttgtctcttctatttcgttacgaaagaagttccattgaaaaacaaactactttttggcagtttgtttgtcctattgattgctagcttttacatcatgcccttaaatttattctggcacggtatgcatgcgccgaacatgtttcttttccgctatagtttcctcttttcattcctagttattttgcttgctggttatggttgggaaaaatttgaaaaggatgatctcggcgtcttaagcggcttgattttgattcttttagcaatttttgctcttgcaatgggcacaaaaggtgctactagttatacgtatgtgactttaacctctttcgtattaacggcaacttttttactattatactttttcggaattgctttttatcaattgaaaaaagcgcctatgcaatacttagtgattttgttgttgctgctcgtttctggtgaagcaatcattaatacacgggcgatggtcactggtattttaaatgattggaactacgcatcacgcagcttgtattctgaaccttatcctgacttaaaaaatctagtcgatcaaacaaaaaaagaaaatgataccttttaccgcttggaaaatttaaatggtgtttcggccaatgacggcattaactatggctacagtggcattagcatgttttcttccgtacggaaccgacattcttcaacatacctaaacgccttaggtttccgctcacgaggcacgaatttaaatattcgttaccaaaataataccttgttaatggatgctttgatgggcattaaatacaatattgctgaaaataatccaatgaaattcggctttgaacgacaagctgctgctggtaaatatcagctttatcgtaacgaaaatgctttgccgttaggatttttagcagacaaagagatttacaatgttcggcaacctctcaatgataatttaggtagtcaaacaaatttactaaatgctttagccaataccaatgaacggtattttaccttttatcaaccaacgatgacgcttcaaaataacgtgacaattacgcaaaatacagctggcgtaacttttacggagaaacaacataacgtagccaaagagatttcttatacagtcaatgtgcccgccaatacgcaagcttatttgagtttattcccaacagattttgctcaattggaaagttccactgcgacggtcaccgtgaacggctcgagtcagcaatcacaaattggcattactggccaatattataatttaggctactatccaaaagatacaactgttaacttcaaagtaagtttttatggaaccaaagcagtaagttttgttcagccgcaagtgg

SEQ ID NO: 148 - protein, 749 aa, Enterococcus faecalis
MKNKSRQFLKNNWPYMLASFFIPFLIMAIIYLSIGIYPGSSRSVLASDAFSQFSNFHASFNNVLHGKQSLFYTWNASLGLNYLSLISYYLGGLFTPLVFFFNNQNMPDALYFLTLLKIGSAGLSFWFLAKQTFKIPKWSHVTLSVSYALMSFIVAHSELIMWLDAFIYLPLVILGIHRLMDQRKPTLLFVSYFLLFITNYYFGFMIGLFSFLYYFARTFTDWQRYKSRIVAYFTTSLLAGGASMIMVLPAVLDLRTNGETLSEITTFKTEATAFLDIIMKNMIGVYDTTKYGSIPFIYIGLLPLIFCLFYFVTKEVPLKNKLLFGSLFVLLIASFYIMPLNLFWHGMHAPNMFLFRYSFLFSFLVILLAGYGWEKFEKDDLGVLSGLILILLAIFALAMGTKGATSYTYVTLTSFVLTATFLLLYFFGIAFYQLKKAPMQYLVILLLLLVSGEAIINTRAMVTGILNDWNYASRSLYSEPYPDLKNLVDQTKKENDTFYRLENLNGVSANDGINYGYSGISMFSSVRNRHSSTYLNALGFRSRGTNLNIRYQNNTLLMDALMGIKYNIAENNPMKFGFERQAAAGKYQLYRNENALPLGFLADKEIYNVRQPLNDNLGSQTNLLNALANTNERYFTFYQPTMTLQNNVTITQNTAGVTFTEKQHNVAKEISYTVNVPANTQAYLSLFPTDFAQLESSTATVTVNGSSQQSQIGITGQYYNLGYYPKDTTVNFKVSFYGTKAVSFVQPQV

SEQ ID NO: 149 - DNA, 2616 bp, Enterococcus faecalis
atgaaaaataaaagtaggcagtttttaaaaaacaactggccttatatgttagccagtttcttcattccatttttaattatggcaattatctatttgagtattgggatttatccaggaagtagtcgcagtgttttagccagcgatgccttttctcaattttcaaattttcacgcaagctttaacaatgttcttcatggaaaacaaagtcttttctatacgtggaatgcttctttgggactaaactacttgtccttaatttcctattatcttggtggcttatttacgccgctcgtctttttctttaacaatcaaaacatgcctgatgcgctctatttcctaacgttgttgaaaattgggagtgctggcttgagtttttggttcttggcaaaacaaacctttaagattcctaaatggtcccatgtgactttaagtgtgtcttatgcgctaatgtccttcattgtggcccattcagaattaattatgtggctggatgcctttatttatctgccactcgtaattttaggaattcatcgtttaatggaccaacgaaaaccgacattattgtttgtcagttatttcttgcttttcattacaaattattattttggctttatgattgggttgttttccttcctgtactattttgcacgaacgtttacagactggcaacgatataaatctcgaatcgttgcgtattttactacttctcttttagctggtggagcatccatgattatggtcttacctgctgtcttagatttacgaaccaatggtgaaactctttctgaaattacaacctttaaaacagaagcgactgcctttttagatattattatgaaaaatatgattggcgtttacgatacaaccaaatatgggtccattccttttatttacattgggttgttgcctttgattttttgtctcttctatttcgttacgaaagaagttccattgaaaaacaaactactttttggcagtttgtttgtcctattgattgctagcttttacatcacgcccttaaatttattctggcacggcatgcatgcgccgaacatgtttcttttccgctatagtttcctcttttcattcctagttattttgcttgctggttatggttgggagaaatttgaaaaggatgatctcggcatcttaagcggcttgattttgattcttttagcaatttttgctcttgcaatgggcacaaaaggtgctactagttatacgtatgtgactttaacctctttcgtattaacggcaacttttttactattatactttttcggaattgctttttatcaattgaaaaaagcgcctatgcaatacttagtgattttgttattgctgctcgtttctggtgaagcaatcattaatacacgggcgatggtcactggtattttagatgattggaactacgcatcacgcagcttgtattctgagccttatcctgacttaaaaaatctagtcgatcaaacaaaaaaagaaaatgataccttttaccgcttggaaaatttaaatggtgtttcggccaatgacggcattaactatggctacagtggcattagcatgttttcttccgtgcggaaccgacattcttcaacatacctaaacgccttaggtttccgctcgcgaggcacgaatttaaatattcgttaccaaaataataccttgttaatggatgctttgatgggcattaaatacaatattgctgaaaacaatccaatgaaattcggctttgagcgacaagctgctgctggtaaatatcagctttatcgtaacgaaaatgctttgccgttaggatttttagcagacaaagagatttacaatgtccggcaacctctcaatgataatttaggtagtcaaacaaatttactaaatgctttagccaataccaatgaacggtattttaccttttatcaaccaacgatgacgcttcaaaataacgtgacaattacgcaaaatacagctggtgtaacttttacggagaaacaacataacgtagccaaagagatttcttatacagtcaatgtgcccgccaatacgcaagcttatttgagtttattcccaacggattttgctcaattggaaagttccactgcgacggtcaccgtgaacggctcaagtcagcaatcacaaattggcattactggccaatattataatttaggttactatcccaaagatacaactgttaacttcaaagtaagtttttatggaaccaaagcagtaagttttgttcagccgcaagtggttggtttaaataccaatgcatttgaaaaagccatttccgccgtgcaagaaaaaggcgttgatttaaccactggcaaacgctctgcttcaggtacctttaccgccgacaaagatcaagtactcgtcactacaattccttatgacaaaggttggcgtgtcaaaattgatggcaaaaaagttaccccaaaagcctttaaagatgcctttctaagcgttcctgtcagcgctggaacccatactattcagttctcttatttaccagaaggattgattcctggcatcgtgttattcgttctatgtactggtggtttcgttgcctacgtaaccttgattcctgctagacgaaaccgtaaaaaagaagacaaataa

SEQ ID NO: 150 - protein, 871 aa, Enterococcus faecalis
MKNKSRQFLKNNWPYMLASFFIPFLIMAIIYLSIGIYPGSSRSVLASDAFSQFSNFHASFNNVLHGKQSLFYTWNASLGLNYLSLISYYLGGLFTPLVFFFNNQNMPDALYFLTLLKIGSAGLSFWFLAKQTFKIPKWSHVTLSVSYALMSFIVAHSELIMWLDAFIYLPLVILGIHRLMDQRKPTLLFVSYFLLFITNYYFGFMIGLFSFLYYFARTFTDWQRYKSRIVAYFTTSLLAGGASMIMVLPAVLDLRTNGETLSEITTFKTEATAFLDIIMKNMIGVYDTTKYGSIPFIYIGLLPLIFCLFYFVTKEVPLKNKLLFGSLFVLLIASFYITPLNLFWHGMHAPNMFLFRYSFLFSFLVILLAGYGWEKFEKDDLGILSGLILILLAIFALAMGTKGATSYTYVTLTSFVLTATFLLLYFFGIAFYQLKKAPMQYLVILLLLLVSGEAIINTRAMVTGILDDWNYASRSLYSEPYPDLKNLVDQTKKENDTFYRLENLNGVSANDGINYGYSGISMFSSVRNRHSSTYLNALGFRSRGTNLNIRYQNNTLLMDALMGIKYNIAENNPMKFGFERQAAAGKYQLYRNENALPLGFLADKEIYNVRQPLNDNLGSQTNLLNALANTNERYFTFYQPTMTLQNNVTITQNTAGVTFTEKQHNVAKEISYTVNVPANTQAYLSLFPTDFAQLESSTATVTVNGSSQQSQIGITGQYYNLGYYPKDTTVNFKVSFYGTKAVSFVQPQVVGLNTNAFEKAISAVQEKGVDLTTGKRSASGTFTADKDQVLVTTIPYDKGWRVKIDGKKVTPKAFKDAFLSVPVSAGTHTIQFSYLPEGLIPGIVLFVLCTGGFVAYVTLIPARRNRKKEDK

SEQ ID NO: 151 - DNA, 2616 bp, Enterococcus faecalis; identical to SEQ ID NO: 111

SEQ ID NO: 152 - protein, 871 aa, Enterococcus faecalis; identical to SEQ ID NO: 112

SEQ ID NO: 153 - DNA, 2616 bp, Enterococcus faecalis
atgaaaaataaaagtaggcagtttttaaaaaacaactggccttatatgttagccagtttcttcattccatttttaattatggcaattatctatttgagtattgggatttatccaggaagtagtcgcagtgttttagccagcgatgccttttctcaattttcaaattttcacgcaagctttaacaatgttcttcatggaaaacaaagtcttttctatacgtggaatgcttctttgggactaaactacttgtccttaatttcctattatcttggtggcttatttacgccgctcgtctttttctttaacaatcaaaacatgcctgatgcgctctatttcctaacgttgttgaaaattgggagtgctggcttgagtttttggttcttggcaaaacaaacctttaagattcctaaatggtcccatgtgactttaagtgtgtcttatgcgctaatgtccttcattgtggcccattcagaattaattatgtggctggatgcctttatttatctgccactcgtaattttaggaattcatcgtttaatggaccaacgaaaaccgacattattgtttgtcagttatttcttgcttttcattacaaattattattttggctttatgattgggttgttttccttcctgtactattttgcacgaacgtttacagactggcaacgatataaatctcgaatcgttgcgtattttactacttctcttttagctggtggaacatccatgattatggttttacctgctgtcttagatttacgaaccaatggtgaaactctttctgaaattacaacctttaaaacagaagcgactgcctttttagatattattatgaaaaatatgattggcgtttacgatacaaccaaatatgggtccattccttttatttacattgggttgttgcctttgattttttgtctcttctatttcgttacgaaagaagttccattgaaaaacaaactactttttggcagtttgtttgtcctattgattgctagcttttacatcacgcccttaaatttattctggcacggcatgcatgcgccgaacatgtttctttttcgctatagtttcctcttttcattcctagttattttgcttgctggttatggttgggaaaaatttgaaaaggatgatctcggcgtcttaagcggcttgattttgattcttttagcaatttttgctcttgcaatgggcacaaaaggtgctactagttatacgtatgtgactttaacctctttcgtattaacggcaacttttttactattatactttttcgggattgctttttatcaattgaaaaaagcgcctatgcaatacttagtgattttgttattgctgctcgtttctggtgaagcaatcattaatacacgggcgatggtcactggtattttagatgattggaactacgcatcacgcagcttgtattctgagccttatcctgacttaaaaaatctagtcgatcaaacaaaaaaagaaaatgataccttttaccgcttggaaaatttaaatggtgtttcggccaatgacggcattaactatggctacagtggcattagcatgttttcttccgtacggaaccgacattcttcaacatacctaaacgccttaggtttccgctcgcgaggcacgaatttaaatattcgttaccaaaataataccttgttaatggatgctttgatgggcattaaatacaatattgctgaaaataatccaatgaaattcggctttgaacgacaagcagctgctggtaaatatcagctttatcgtaacgaaaatgctttgccgttaggatttttaacagacaaagagatttacaatgttcggcaacctctcaatgataatttaggtagtcaaacaaatttactaaatgctttagccaatactaatgaacggtattttaccttttatcaaccaacgatgacgcttcaaaataacgtgacaattacgcaaaatacagctggtgtaacttttacggagaaacaacataacgtagccaaagagatttcttatacagtcaatgtgcccgccaatacgcaagcttatttgagtttattcccaacggattttgctcaattggaaagttccactgcgacggtcactgtgaacggatcgagtcagcaatcacaaattggcattactggccaatattataatttaggctactatccaaaagatacaactgttaacttcaaagtaagtttttatggaaccaaagcagtaagttttgttcagccgcaagtggttggcttaaataccaatgcatttgaaaaagccatttccgccgtgcaagaaaaaggcgttgatttaaccactggcaaacgctctgcttcaggtacctttaccgccgacaaagatcaagtactcgtcactacaattccttatgacaaaggttggcgtgtcaaaattgatggcaaaaaagttaccccaaaagcctttaaagatgcctttctaagcgttcctgtcagcgctggaacccatactattcagttctcttatttaccagaaggattgattcctggcatcgtgttattcgttctatgtactggtggtttcgttgcctacgtaaccttgattcctgctagacgaaaccgtaaaaaagaagacaaataa

SEQ ID NO: 154 - protein, 871 aa, Enterococcus faecalis
MKNKSRQFLKNNWPYMLASFFIPFLIMAIIYLSIGIYPGSSRSVLASDAFSQFSNFHASFNNVLHGKQSLFYTWNASLGLNYLSLISYYLGGLFTPLVFFFNNQNMPDALYFLTLLKIGSAGLSFWFLAKQTFKIPKWSHVTLSVSYALMSFIVAHSELIMWLDAFIYLPLVILGIHRLMDQRKPTLLFVSYFLLFITNYYFGFMIGLFSFLYYFARTFTDWQRYKSRIVAYFTTSLLAGGTSMIMVLPAVLDLRTNGETLSEITTFKTEATAFLDIIMKNMIGVYDTTKYGSIPFIYIGLLPLIFCLFYFVTKEVPLKNKLLFGSLFVLLIASFYITPLNLFWHGMHAPNMFLFRYSFLFSFLVILLAGYGWEKFEKDDLGVLSGLILILLAIFALAMGTKGATSYTYVTLTSFVLTATFLLLYFFGIAFYQLKKAPMQYLVILLLLLVSGEAIINTRAMVTGILDDWNYASRSLYSEPYPDLKNLVDQTKKENDTFYRLENLNGVSANDGINYGYSGISMFSSVRNRHSSTYLNALGFRSRGTNLNIRYQNNTLLMDALMGIKYNIAENNPMKFGFERQAAAGKYQLYRNENALPLGFLTDKEIYNVRQPLNDNLGSQTNLLNALANTNERYFTFYQPTMTLQNNVTITQNTAGVTFTEKQHNVAKEISYTVNVPANTQAYLSLFPTDFAQLESSTATVTVNGSSQQSQIGITGQYYNLGYYPKDTTVNFKVSFYGTKAVSFVQPQVVGLNTNAFEKAISAVQEKGVDLTTGKRSASGTFTADKDQVLVTTIPYDKGWRVKIDGKKVTPKAFKDAFLSVPVSAGTHTIQFSYLPEGLIPGIVLFVLCTGGFVAYVTLIPARRNRKKEDK

SEQ ID NO: 155 - DNA, 2616 bp, Enterococcus faecalis; identical to SEQ ID NO: 111

SEQ ID NO: 156 - protein, 871 aa, Enterococcus faecalis; identical to SEQ ID NO: 112

SEQ ID NO: 157 - DNA, 2496 bp, Enterococcus faecalis
atgaaaaataaaagtaggcagtttttaaaaaacaactggccttatatgttagccagtttcttcattccatttttaattatggcaattatctatttgagtattgggatttatccaggaagtagtcgcagtgttttagccagcgatgccttttctcaattttcaaattttcacgcaagctttaacaatgttcttcatggaaaacaaagtcttttctatacgtggaatgcttctttgggactaaactacttgtccttaatttcctattatcttggtggcttatttacgccgctcgtctttttctttaacaatcaaaacatgcctgatgcgctctatttcctaacgttgttgaaaattgggagtgctggcttgagtttttggttcttggcaaaacaaacctttaagattcctaaatggtcccatgtgactttaagtgtgtcttatgcgctaatgtccttcattgtggcccattcagaattaattatgtggctggatgcctttatttatctgccactcgtaattttaggaattcatcgtttaatggaccaacgaaaaccgacattattgtttgtcagttatttcttgcttttcattacaaattattattttggctttatgattgggttgttttccttcctgtactattttgcacgaacgtttacagactggcaacgatataaatctcgaatcgttgcgtattttactacttctcttttagctggtggagcatccatgattatggtcttacctgctgtcttagatttacgaaccaatggtgaaactctttctgaaattacaacctttaaaacagaagcgactgcctttttagatattattatgaaaaatatgattggcgtttacgatacaaccaaatatgggtccattccttttatttacattgggttgttgcctttgattttttgtctcttctatttcgttacgaaagaaattccattgaaaaacaaactactttttggcagtttgtttgtcctattgattgctagcttttacatcacgcccttaaatttattctggcacggtatgcatgcgccgaacatgtttcttttccgctatagtttcctcttttcattcctagttattttgcttgctggttatggttgggaaaaatttgaaaaggatgatctcggcgtcttaagcggcttgattttgattcttttagcaatttttgctcttgcaatgggcacaaaaggtgctactagttatacgtatgtgactttaacctctttcgtattaacggcaacttttttactattatactttttcgggattgctttttatcaattgaaaaaagcgcctatgcaatacttagtgattttactattgctgctcgtttctggtgaagcaatcattaatacacgagcgatggtcactggtattttagatgattggaactacgcatcacgcagcttgtattctgagccttaccctgacttaaaaaatctagtcgatcaaacaaaaaaagaaaatgataccttttatcgcttggaaaatttaaatggtgtttcggccaatgacggcattaactatggctacagtggcattagcatgttttcttccgtacggaaccgacattcttcaacatacctaaacgccttaggtttccgctcgcgaggcacgaatttaaatattcgttaccaaaataataccttgttaatggatgctttgatgggcattaaatacaatattgctgaaaacaatccaatgaaattcggctttgagcgacaagcagctgctggtaaatatcagctttatcgtaacgaaaatgctttgccgttaggatttttagcagacaaagagatttacaatgtccggcaacctatcaatgataatttaggtagtcaaacaaatttactaaatgctttagccaataccaatgaacggtattttaccttttatcaaccaacgatgacgcttcaaaataacgtgacaattacgcaaaatacagctggcgtaacttttacggagaaacaacataacgtagccaaagagatttcttatacagtcaatgtgcccgccaatacgcaagcttatttgagtttattcccaacggattttgctcaattggaaagttccactgcgacggtcaccgtgaacggctcgagtcagcaatcacaaattggcattactggccaatattataatttaggctactatccaaaagatacaactgttaacttcaaagtaagtttttatggaaccaaagcagtaagttttgttcagccgcaagtagttggcttaaataccaatgcatttgaaaaagccatttccgccgtgcaagaaaaaggcgttgatttaaccactggcaaacgctctgcttcaggtacctttaccgccgacaaagatcaagtactcgtcactacaattccttatgacaaaggttggcgtgtcaaaattgatggcaaaaaagttaccccaaaagcctttaaagatgcctttctaagcgttcctgtcagcgctggaacccatactattcagttc

SEQ ID NO: 158 - protein, 832 aa, Enterococcus faecalis
MKNKSRQFLKNNWPYMLASFFIPFLIMAIIYLSIGIYPGSSRSVLASDAFSQFSNFHASFNNVLHGKQSLFYTWNASLGLNYLSLISYYLGGLFTPLVFFFNNQNMPDALYFLTLLKIGSAGLSFWFLAKQTFKIPKWSHVTLSVSYALMSFIVAHSELIMWLDAFIYLPLVILGIHRLMDQRKPTLLFVSYFLLFITNYYFGFMIGLFSFLYYFARTFTDWQRYKSRIVAYFTTSLLAGGASMIMVLPAVLDLRTNGETLSEITTFKTEATAFLDIIMKNMIGVYDTTKYGSIPFIYIGLLPLIFCLFYFVTKEIPLKNKLLFGSLFVLLIASFYITPLNLFWHGMHAPNMFLFRYSFLFSFLVILLAGYGWEKFEKDDLGVLSGLILILLAIFALAMGTKGATSYTYVTLTSFVLTATFLLLYFFGIAFYQLKKAPMQYLVILLLLLVSGEAIINTRAMVTGILDDWNYASRSLYSEPYPDLKNLVDQTKKENDTFYRLENLNGVSANDGINYGYSGISMFSSVRNRHSSTYLNALGFRSRGTNLNIRYQNNTLLMDALMGIKYNIAENNPMKFGFERQAAAGKYQLYRNENALPLGFLADKEIYNVRQPINDNLGSQTNLLNALANTNERYFTFYQPTMTLQNNVTITQNTAGVTFTEKQHNVAKEISYTVNVPANTQAYLSLFPTDFAQLESSTATVTVNGSSQQSQIGITGQYYNLGYYPKDTTVNFKVSFYGTKAVSFVQPQVVGLNTNAFEKAISAVQEKGVDLTTGKRSASGTFTADKDQVLVTTIPYDKGWRVKIDGKKVTPKAFKDAFLSVPVSAGTHTIQF

SEQ ID NO: 159 - DNA, 2616 bp, Enterococcus faecalis
atgaaaaataaaagtaggcagtttttaaaaaacaactggccttatatgttagccagtttcttcattccatttttaattatggcaattatctatttgagtattgggatttatccaggaagtagtcgcagtgttttagccagcgatgccttttctcaattttcaaattttcacgcaagctttaacaatgttcttcatggaaaacaaagtcttttctatacgtggaatgcttctttgggactaaactacttgtccttaatttcctattatcttggtggcttatttacgccgctcgtctttttctttaacaatcaaaacatgcctgatgcgctctatttcctaacgttgttgaaaattgggagtgctggcttgagtttttggttcttggcaaaacaaacctttaagattcctaaatggtcccatgtgactttaagtgtgtcttatgcgctaatgtccttcattgtggcccattcagaattaattatgtggctggatgcctttatttatctgccactcgtaattttaggaattcatcgtttaatggaccaacgaaaaccgacattattgtttgtcagttatttcttgcttttcattacaaattattattttggctttatgattgggttgttttccttcctgtactattttgcacgaacgtttacagactggcaacgatataaatctcgaatcgttgcgtattttactacttctcttttagctggtggagcatccatgattatggtcttacctgctgtcttagatttacgaaccaatggtgaaactctttctgaaattacaacctttaaaacagaagcgactgcctttttagatattattatgaaaaatatgattggcgtttacgatacaaccaaatatgggtccattccttttatttacattgggttgttgcctttgattttttgtctcttctatttcgttacgaaagaaattccattgaaaaacaaactactttttggcagtttgtttgtcctattgattgctagcttttacatcacgcccttaaatttattctggcacggtatgcatgcgccgaacatgtttcttttccgctatagtttcctcttttcattcctagttattttgcttgctggttatggttgggaaaaatttgaaaaggatgatctcggcgtcttaagcggcttgattttgattcttttagcaatttttgctcttgcaatgggcacaaaaggtgctactagttatacgtatgtgactttaacctctttcgtattaacggcaacttttttactattatactttttcgggattgctttttatcaattgaaaaaagcgcctatgcaatacttagtgattttgttattgctgctcgtttctggtgaagcaatcattaatacacgagcgatggtcactggtattttagatgattggaactacgcatcacgcagcttgtattctgagccttatcctgacttaaaaaatctagtcgatcaaacaaaaaaagaaaatgataccttttaccgcttggaaaatttaaatggtgtttcggccaatgacggcattaactatggctacagtggcattagcatgttttcttccgtacggaaccgacattcttcaacatacctaaacgccttaggtttccgctcgcgaggcacgaatttaaatattcgttaccaaaataataccttgttaatggatgctttgatgggcattaaatacaatattgctgaaaacaatccaatgaaattcggctttgagcgacaagcagctgctggtaaatatcagctttatcgtaacgaaaatgctttgccgttaggatttttagcagacaaagagatttacaatgttcggcaacctctcaatgataatttaggtagtcaaacaaatttactaaatgctttagccaataccaatgaacggtattttaccttttatcaaccaacgatgacgcttcaaaataacgtgacaattacgcaaaatacagctggcgtaacttttacggagaaacaacataacgtagccaaagagatttcttatacagtcaatgtgcccgccaatacgcaagcttatttgagtttattcccaacggattttgctcaattggaaagttccactgcgacggtcaccgtgaacggctcaagtcagcaatcacaaattggcattactggccaatattataatttaggctactatccaaaagatacaactgttaacttcaaagtaagtttttatggaaccaaagcagtaagttttgttcagccgcaagtagttggcttaaataccaatgcatttgaaaaagccatttccgccgtgcaagaaaaaggcgttgatttaaccactggcaaacgctctgcttcaggtacctttaccgccgacaaagatcaagtactcgtcactacaattccttatgacaaaggttggcgtgtcaaaattgatggcaaaaaagttaccccaaaagcatttaaagatgcctttctaagcgttcctgtcagcgctggaacccatactattcagttctcttatttaccagaaggattgattcctggcatcgtgttattcgttctatgtactggtggtttcgttgcctacgtaaccttgattccagctagacgaaaccgtaaaaaagaagacaaataa

SEQ ID NO: 160 - protein, 871 aa, Enterococcus faecalis; identical to SEQ ID NO: 112

SEQ ID NO: 161 - DNA, 2616 bp, Enterococcus faecalis
atgaaaaataaaagtaggcagtttttaaaaaacaactggccttatatgttagccagtttcttcattccatttttaattatggcaattatctatttgagtattgggatttatccaggaagtagtcgcagtgttttagccagcgatgccttttctcaattttcaaattttcacgcaagctttaacaatgttcttcatggaaaacaaagtcttttctatacgtggaatgcttctttgggactaaactacttgtccttaatttcctattatcttggtggcttatttacgccgctcgtctttttctttaacaatcaaaacatgcctgatgcgctctatttcctaacgttgttgaaaattgggagtgctggcttgagtttttggttcttggcaaaacaaacctttaagattcctaaatggtcccatgtgactttaagtgtgtcttatgcgctaatgtccttcattgtggcccattcagaattaattatgtggctggatgcctttatttatctgccactcgtaattttaggaattcatcgtttaatggaccaacgaaaaccgacattattgtttgtcagttatttcttgcttttcattacaaattattattttggctttatgattgggttgttttccttcctgtactattttgcacgaacgtttacagactggcaacgatataaatctcgaatcgttgcgtattttactacttctcttttagctggtggagcatccatgattatggtcttacctgctgtcttagatttacgaaccaatggtgaaactctttctgaaattacaacctttaaaacagaagcgactgcctttttagatattattatgaaaaatatgattggcgtttacgatacaaccaaatatgggtccattccttttatttacattgggttgttgcctttgattttttgtctcttctatttcgttacgaaagaagttccattgaaaaacaaactactttttggcagtttgtttgtcctattgattgctagcttttacatcacgcccttaaatttattctggcacggcatgcatgcgccgaacatgtttctttttcgctatagtttcctcttttcattcctagttattttgcttgctggttatggttgggagaaatttgaaaaggatgatctcggcgtcttaagcggcttgattttgattcttttagcaatttttgctcttgcaatgggcacaaaaggtgctactagttatacgtatgtgactttaacctctttcgtattaacggcaacttttttactattatactttttcgggattgctttttatcaattgaaaaaagcgcctatgcaatacttagtgattttgttgttgctgctcgtttctggtgaagcaatcattaatacacgagcgatggtcactggtattttagatgattggaactacgcatcacgcagcttgtattctgagccttatcctgacttaaaaaatctagtcgatcaaacaaaaaaagaaaatgataccttttaccgcttggaaaatttaaatggtgtttcggccaatgacggcattaactatggctacagtggcattagcatgttttcttccgtacggaaccgacattcttcaacatacctaaacgccttaggtttccgctcgcgaggcacgaatttaaatattcgttaccaaaataataccttgttaatggatgctttgatgggcattaaatacaatattgctgaaaacaatccaatgaaattcggctttgagcgacaagcagctgctggtaaatatcagctttatcgtaacgaaaatgctttgccgttaggatttttagcagacaaagagatttacaatgttcggcaacctctcaatgataatttaggtagtcaaacaaatttactaaatgctttagccaatactaatgaacggtattttaccttttatcaaccaacgatgacgcttcaaaataacgtgacaattacgcaaaatacagctggcgtaacttttacggagaaacaacataacgtagccaaagagatttcttatacagtcaatgtgcccgccaatacgcaagcttatttgagtttattcccaacagattttgctcaattggaaagttccactgcaacggtcaccgtgaacggctcgagtcagcaatcacaaattggcattactggccaatattataacttaggttactatcccaaagatacaaccgttaacttcaaagtaagtttttatggaaccaaagcagtaagttttgttcagccgcaagtagttggcttaaataccaatgcatttgaaaaagccatttccgccgtgcaagaaaaaggcgttgatttaacaactggcaaacgctctgcttcaggtacctttaccgccgacaaagatcaagtactcgtcactacaattccttatgacaaaggttggcgtgtcaaaattgatggcaaaaaagttaccccaaaagcctttaaagatgcctttctaagcgttcctgtcagcgctggaacccatactattcagttctcttatttaccagaaggattgattcctggcatcgtgttattcgttctatgtactggtggtttcgttgcctacgtaaccttgattcctgctagacgaaaccgtaaaaaagaagacaaataa

SEQ ID NO: 162 - protein, 871 aa, Enterococcus faecalis; identical to SEQ ID NO: 65

SEQ ID NO: 163 - DNA, 1714 bp, Enterococcus faecalis
atgaaaaataaaagtaggcagtttttaaaaaacaactggccttatatgttagccagtttcttcattccatttttaattatggcaattatctatttgagtattgggatttatccaggaagtagtcgcagtgttttagccagcgatgccttttctcaattttcaaattttcacgcaagctttaacaatgttcttcatggaaaacaaagtcttttctatacgtggaatgcttctttgggactaaactacttgtccttaatttcctattatcttggtggcttatttacgccgctcgtctttttctttaacaatcaaaacatgcctgatgcgctctatttcctaacgttgttgaaaattgggagtgctggcttgagtttttggttcttggcaaaacaaacctttaagattcctaaatggtcccatgtgactttaagtgtgtcttatgcgctaatgtccttcattgtggcccattcagaattaattatgtggctggatgcctttatttatctgccactcgtaattttaggaattcatcgtttaatggaccaacgaaaaccgacattattgtttgtcagttatttcttgcttttcattacaaattattattttggctttatgattgggttgttttccttcctgtactattttgcacgaacgtttacagactggcaacgatataaatctcgaatcgttgcgtattttactacttctcttttagctggtggagcatccatgattatggtcttacctgctgtcttagatttacgaaccaatggtgaaactctttctgaaattacaacctttaaaacagaagcgactgcctttttagatattattatgaaaaatatgattggcgtttacgatacaaccaaatatgggtccattccttttatttacattgggttgttgcctttgattttttgtctcttctatttcgttacgaaagaaattccattgacaaacaaactactttttggcagtttgtttgtcctattgattgctagcttttacatcacgcccttaaatttattctggcacggtatgcatgcgccgaacatgtttcttttccgctatagtttcctcttttcattcctagttattttgcttgctggttatggttgggaaaaatttgaaaaggatgatctcggcgtcttaagcggcttgattttgattcttttagcaatttttgctcttgcaatgggcacaaaaggtgctactagttatacgtatgtgactttaacctctttcgtattaacggcaacttttttactattatactttttcgggattgctttttatcaattgaaaaaagcgcctatgcaatacttagtgattttactattgctgctcgtttctggtgaagcaatcattaatacacgagcgatggtcactggtattttagatgattggaactacgcatcacgcagcttgtattctgagccttaccctgacttaaaaaatctagtcgatcaaacaaaaaaagaaaatgataccttttatcgcttggaaaatttaaatggtgtttcggccaatgacggcattaactatggctacagtggcattagcatgttttcttccgtacggaaccgacattcttcaacatacctaaacgccttaggtttccgctcgcgaggcacgaatttaaatattcgttaccaaaataataccttgttaatggatgctttgatgggcattaaatacaatattgctgaaaaca

SEQ ID NO: 164 - protein, 571 aa, Enterococcus faecalis
MKNKSRQFLKNNWPYMLASFFIPFLIMAIIYLSIGIYPGSSRSVLASDAFSQFSNFHASFNNVLHGKQSLFYTWNASLGLNYLSLISYYLGGLFTPLVFFFNNQNMPDALYFLTLLKIGSAGLSFWFLAKQTFKIPKWSHVTLSVSYALMSFIVAHSELIMWLDAFIYLPLVILGIHRLMDQRKPTLLFVSYFLLFITNYYFGFMIGLFSFLYYFARTFTDWQRYKSRIVAYFTTSLLAGGASMIMVLPAVLDLRTNGETLSEITTFKTEATAFLDIIMKNMIGVYDTTKYGSIPFIYIGLLPLIFCLFYFVTKEIPLTNKLLFGSLFVLLIASFYITPLNLFWHGMHAPNMFLFRYSFLFSFLVILLAGYGWEKFEKDDLGVLSGLILILLAIFALAMGTKGATSYTYVTLTSFVLTATFLLLYFFGIAFYQLKKAPMQYLVILLLLLVSGEAIINTRAMVTGILDDWNYASRSLYSEPYPDLKNLVDQTKKENDTFYRLENLNGVSANDGINYGYSGISMFSSVRNRHSSTYLNALGFRSRGTNLNIRYQNNTLLMDALMGIKYNIAEN

SEQ ID NO: 165 - DNA, 1699 bp, Enterococcus faecalis
atgaaaaataaaagtaggcagtttttaaaaaacaactggccttatatgttagccagtttcttcattccatttttaattatggcaattatctatttgagtattgggatttatccaggaagtagtcgcagtgttttagccagcgatgccttttctcaattttcaaattttcacgcaagctttaacaatgttcttcatggaaaacaaagtcttttctatacgtggaatgcttctttgggactaaactacttgtccttaatttcctattatcttggtggcttatttacgccgctcgtctttttctttaacaatcaaaacatgcctgatgcgctctatttcctaacgttgttgaaaattgggagtgctggcttgagtttttggttcttggcaaaacaaacctttaagattcctaaatggtcccatgtgactttaagtgtgtcttatgcgctaatgtccttcattgtggcccattcagaattaattatgtggctggatgcctttatttatctgccactcgtaattttaggaattcatcgtttaatggaccaacgaaaaccgacattattgtttgtcagttatttcttgcttttcattacaaattattattttggctttatgattgggttgttttccttcctgtactattttgcacgaacgtttacagactggcaacgatataaatctcgaatcgttgcgtattttactacttctcttttagctggtggagcatccatgattatggtcttacctgctgtcttagatttacgaaccaatggtgaaactctttctgaaattacaacctttaaaacagaagcgactgcctttttagatattattatgaaaaatatgattggcgtttacgatacaaccaaatatgggtccattccttttatttacattgggttgttgcctttgattttttgtctcttctatttcgttacgaaagaagttccattgaaaaacaaactactttttggcagtttgtttgtcctattgattgctagcttttacatcacgcccttaaatttattctggcacggtatgcatgcgccgaacatgtttcttttccgctatagtttcctcttttcattcctagttattttgcttgctggttatggttgggaaaaatttgaaaaggatgatctcggcgtcttaagcggcttgattttgattcttttagcaatttttgctcttgcaatgggcacaaaaggtgctactagttatacgtatgtgactttaacctctttcgtattaacggcaacttttttactattatactttttcgggattgctttttatcaattgaaaaaagcgcctatgcaatacttagtgattttgttattactgctcgtttctggtgaagcaatcattaatacacgggcgatggtcactggtattttagatgattggaactacgcatcacgcagcttgtattctgagccttaccctgacttaaaaaatctagtcgatcaaacaaaaaaagaaaatgataccttttatcgcttggaaaatttaaatggtgtttcggccaatgacggcattaactatggctacagtggcattagcatgttttcttccgtacggaaccgacattcttcaacatacctaaacgccttaggtttccgctcgcgaggcacgaatttaaatattcgttaccaaaataataccttgttaatggatgctttgatgggcattaaataca

SEQ ID NO: 166 - protein, 566 aa, Enterococcus faecalis
MKNKSRQFLKNNWPYMLASFFIPFLIMAIIYLSIGIYPGSSRSVLASDAFSQFSNFHASFNNVLHGKQSLFYTWNASLGLNYLSLISYYLGGLFTPLVFFFNNQNMPDALYFLTLLKIGSAGLSFWFLAKQTFKIPKWSHVTLSVSYALMSFIVAHSELIMWLDAFIYLPLVILGIHRLMDQRKPTLLFVSYFLLFITNYYFGFMIGLFSFLYYFARTFTDWQRYKSRIVAYFTTSLLAGGASMIMVLPAVLDLRTNGETLSEITTFKTEATAFLDIIMKNMIGVYDTTKYGSIPFIYIGLLPLIFCLFYFVTKEVPLKNKLLFGSLFVLLIASFYITPLNLFWHGMHAPNMFLFRYSFLFSFLVILLAGYGWEKFEKDDLGVLSGLILILLAIFALAMGTKGATSYTYVTLTSFVLTATFLLLYFFGIAFYQLKKAPMQYLVILLLLLVSGEAIINTRAMVTGILDDWNYASRSLYSEPYPDLKNLVDQTKKENDTFYRLENLNGVSANDGINYGYSGISMFSSVRNRHSSTYLNALGFRSRGTNLNIRYQNNTLLMDALMGIKY

SEQ ID NO: 167 - DNA, 2616 bp, Enterococcus faecalis
atgaaaaataaaagtaggcagtttttaaaaaacaactggccttatatgttagccagtttcttcattccatttttaattatggcaattatctatttgagtattgggatttatccaggaagtagtcgcagtgttttagccagcgatgccttttctcaattttcaaattttcacgcaagctttaacaatgttcttcatggaaaacaaagtcttttctatacgtggaatgcttctttgggactaaactacttgtccttaatttcctattatcttggtggcttatttacgccgctcgtctttttctttaacaatcaaaacatgcctgatgcgctctatttcctaacgttgttgaaaattgggagtgctggcttgagtttttggttcttggcaaaacaaacctttaagattcctaaatggtcccatgtgactttaagtgtgtcttatgcgctaatgtccttcattgtggcccattcagaattaattatgtggctggatgcctttatttatctgccactcgtaattttaggaattcatcgtttaatggaccaacgaaaaccgacattattgtttgtcagttatttcttgcttttcattacaaattattattttggctttatgattgggttgttttccttcctgtactattttgcacgaacgtttacagactggcaacgatataaatctcgaatcgttgcgtattttactacttctcttttagctggtggagcatccatgattatggtcttacctgctgtcttagatttacgaaccaatggtgaaactctttctgaaattacaacctttaaaacagaagcgactgcctttttagatattattatgaaaaatatgattggcgtttacgatacaaccaaatatgggtccattccttttatttacattgggttgttgcctttgattttttgtctcttctatttcgttacgaaagaagttccattgaaaaacaaactactttttggcagtttgtttgtcctattgattgctagcttttacatcacgcccttaaatttattctggcacggtatgcatgcgccgaacatgtttcttttccgctatagtttcctcttttcattcctagttattttgcttgctggttatggttgggaaaaatttgaaaaggatgatctcggcgtcttaagcggcttgattttgattcttttagcaatttttgctcttgcaatgggcacaaaaggtgctactagttatacgtatgtgactttaacctctttcgtattaacggcaacttttttactattatactttttcgggattgctttttatcaattgaaaaaagcgcctatgcaatacttagtgattttgttattactgctcgtttctggtgaagcaatcattaatacacgggcgatggtcactggtattttagatgattggaactacgcatcacgcagcttgtattctgagccttaccctgacttaaaaaatctagtcgatcaaacaaaaaaagaaaatgataccttttatcgcttggaaaatttaaatggtgtttcggccaatgacggcattaactatggctacagtggcattagcatgttttcttccgtacggaaccgacattcttcaacatacctaaacgccttaggtttccgctcgcgaggcacgaatttaaatattcgttaccaaaataataccttgttaatggatgctttgatgggcattaaatacaatattgctgaaaacaatccaatgaaattcggctttgagcgacaagcagctgctggtaaatatcagctttatcgtaacgaaaatgctttgccgttaggatttttagcagacaaagagatttacaatgtccggcaacctatcaatgataatttaggtagtcaaacaaatttactaaatgctttagccaataccaatgaacggtattttaccttttatcaaccaacgatgacgcttcaaaataacgtgacaattacgcaaaatacagctggcgtaacttttacggagaaacaacataacgtagccaaagagatttcttatacagtcaatgtgcccgccaatacgcaagcttatttgagtttattcccaacggattttgctcaattggaaagttccactgcgacggtcaccgtgaacggctcgagtcagcaatcacaaattggcattactggccaatattataatttaggctactatccaaaagatacaactgttaacttcaaagtaagtttttatggaaccaaagcagtaagttttgttcagccgcaagtagttggcttaaataccaatgcatttgaaaaagccatttccgccgtgcaagaaaaaggcgttgatttaaccactggcaaacgctctgcttcaggtacctttaccgccgacaaagatcaagtactcgtcactacaattccttatgacaaaggttggcgtgtcaaaattgatggcaaaaaagttaccccaaaagcatttaaagatgcctttctaagcgttcctgtcagcgctggaacccatactattcagttctcttatttaccagaaggattgattcctggcatcgtgttattcgttctatgtactggtggtttcgttgcctacgtaaccttgattcctgctagacgaaaccgtaaaaaagaagacaaataa

SEQ ID NO: 168 - protein, 871 aa, Enterococcus faecalis
MKNKSRQFLKNNWPYMLASFFIPFLIMAIIYLSIGIYPGSSRSVLASDAFSQFSNFHASFNNVLHGKQSLFYTWNASLGLNYLSLISYYLGGLFTPLVFFFNNQNMPDALYFLTLLKIGSAGLSFWFLAKQTFKIPKWSHVTLSVSYALMSFIVAHSELIMWLDAFIYLPLVILGIHRLMDQRKPTLLFVSYFLLFITNYYFGFMIGLFSFLYYFARTFTDWQRYKSRIVAYFTTSLLAGGASMIMVLPAVLDLRTNGETLSEITTFKTEATAFLDIIMKNMIGVYDTTKYGSIPFIYIGLLPLIFCLFYFVTKEVPLKNKLLFGSLFVLLIASFYITPLNLFWHGMHAPNMFLFRYSFLFSFLVILLAGYGWEKFEKDDLGVLSGLILILLAIFALAMGTKGATSYTYVTLTSFVLTATFLLLYFFGIAFYQLKKAPMQYLVILLLLLVSGEAIINTRAMVTGILDDWNYASRSLYSEPYPDLKNLVDQTKKENDTFYRLENLNGVSANDGINYGYSGISMFSSVRNRHSSTYLNALGFRSRGTNLNIRYQNNTLLMDALMGIKYNIAENNPMKFGFERQAAAGKYQLYRNENALPLGFLADKEIYNVRQPINDNLGSQTNLLNALANTNERYFTFYQPTMTLQNNVTITQNTAGVTFTEKQHNVAKEISYTVNVPANTQAYLSLFPTDFAQLESSTATVTVNGSSQQSQIGITGQYYNLGYYPKDTTVNFKVSFYGTKAVSFVQPQVVGLNTNAFEKAISAVQEKGVDLTTGKRSASGTFTADKDQVLVTTIPYDKGWRVKIDGKKVTPKAFKDAFLSVPVSAGTHTIQFSYLPEGLIPGIVLFVLCTGGFVAYVTLIPARRNRKKEDK

SEQ ID NO: 169 - DNA, 2616 bp, Enterococcus faecalis
atgaaaaataaaagtaggcagtttttaaaaaacaactggccttatatgttagccagtttcttcattccatttttaattatggcaattatctatttgagtattgggatttatccaggaagtagtcgcagtgttttagccagcgatgccttttctcaattttcaaattttcacgcaagctttaacaatgttcttcatggaaaacaaagtcttttctatacgtggaatgcttctttgggactaaactacttgtccttaatttcctattatcttggtggcttatttacgccgctcgtctttttctttaacaatcaaaacatgcctgatgcgctctatttcctaacgttgttgaaaattgggagtgctggcttgagtttttggttcttggcaaaacaaacctttaagattcctaaatggtcccatgtgactttaagtgtgtcttatgcgctaatgtccttcattgtggcccattcagaattaattatgtggctggatgcctttatttatctgccactcgtaattttaggaattcatcgtttaatggaccaacgaaaaccgacgttattgtttgtcagttatttcttgcttttcattacaaattattattttggctttatgattgggttgttttccttcctgtactattttgcacgaacgtttacagactggcaacgatataaatctcgaatcgttgcgtattttactacttctcttttagctggtggagcatccatgattatggtcttacctgctgtcttagatttacgaaccaatggtgaaactctttctgaaattacaacctttaaaacagaagcgactgcctttttagatattattatgaaaaatatgattggcgtttacgatacaaccaaatatgggtccattccttttatttacattgggttgttgcctttgattttttgtctcttctatttcgttacgaaagaagttccattgaaaaacaaactactttttggtagcttgtttgtcctcttgattgctagcttttacatcacgcccttaaatttattctggcacggcatgcatgcgccgaacatgtttcttttccgctatagtttcctcttttcattcctagttattttgcttgctggttatggttgggaaaaatttgaaaaggatgatctcggcgtcttaagcggcttgattttgattcttttagcaatttttgctcttgcaatgggcacaaaaggtgctactagttatacgtatgtgactttaacctctttcgtattaacggcaacttttttactgctatattttttcgggattgctttttatcaattgaaaaaagcgcctatacaatacttagtgattttactattgctgctcgtttctggtgaagcaatcattaatacacgggcgatggtcactggtattttagatgattggaactacgcatcacgtagtttgtattctgaaccttatcctgacttaaaaaatctagtcgatcaaacaaaaaaagaaaatgataccttttaccgcttagaaaatttaaatggtgtttctgccaatgacggcattaactatggctacagtggtattagcatgttttcttccgtgcggaaccgacattcttcaacatacctaaacgccttaggtttccgctcgcgaggcacgaatttaaatattcgttaccaaaataataccttgttaatggatgctttgatgggcattaaatacaatattgctgaaaacaatccaatgaaattcggctttgagcgacaagcagctgctggtaaatatcagctttatcgtaacgaaaatgctttgccgctaggatttttagcagacaaagagatttacaatgttcggcaacctctcaatgataatttaggtagtcaaacaaatttactaaatgctttagccaataccaatgaacggtattttaccttttatcaaccaacgatgacgcttcaaaataacgtgacaattacgcaaaatacagctggcgtaacttttacggagaaacaacataacgtagccaaagagatttcttatacagtcaatgtgcccgccaatacgcaagcttatttgagtttattcccaacagattttgctcaattggaaagttccactgcgacggtcaccgtgaacggctcaagtcagcaatcacaaattggcattactggccaatattataatttaggttactatccaaaagatacaactgttaacttcaaagtaagtttttatggaaccaaatcagtaagttttgttcagccgcaagtggttggcttaaataccaatgcatttgaaaaagccatttccgccgtgcaagaaaaaggcgttgatttaacaactggcaaacgctctgcttcaggtacctttaccgccgacaaagatcaagtactcgtcactacaattccttatgacaaaggttggcgtgtcaaaattgatggcaaaaaagttaccccaaaagcctttaaagatgcctttctaagcgttcctgtcagcgctggaacccatactattcagttctcttatttaccagaaggattgattcctggcatcgtgttattcgttctatgtactggtggtttcgttgcctacgtaaccttgattcctgctagacgaaaccgtaaaaaagaagacaaataa

SEQ ID NO: 170 - protein, 871 aa, Enterococcus faecalis
MKNKSRQFLKNNWPYMLASFFIPFLIMAIIYLSIGIYPGSSRSVLASDAFSQFSNFHASFNNVLHGKQSLFYTWNASLGLNYLSLISYYLGGLFTPLVFFFNNQNMPDALYFLTLLKIGSAGLSFWFLAKQTFKIPKWSHVTLSVSYALMSFIVAHSELIMWLDAFIYLPLVILGIHRLMDQRKPTLLFVSYFLLFITNYYFGFMIGLFSFLYYFARTFTDWQRYKSRIVAYFTTSLLAGGASMIMVLPAVLDLRTNGETLSEITTFKTEATAFLDIIMKNMIGVYDTTKYGSIPFIYIGLLPLIFCLFYFVTKEVPLKNKLLFGSLFVLLIASFYITPLNLFWHGMHAPNMFLFRYSFLFSFLVILLAGYGWEKFEKDDLGVLSGLILILLAIFALAMGTKGATSYTYVTLTSFVLTATFLLLYFFGIAFYQLKKAPIQYLVILLLLLVSGEAIINTRAMVTGILDDWNYASRSLYSEPYPDLKNLVDQTKKENDTFYRLENLNGVSANDGINYGYSGISMFSSVRNRHSSTYLNALGFRSRGTNLNIRYQNNTLLMDALMGIKYNIAENNPMKFGFERQAAAGKYQLYRNENALPLGFLADKEIYNVRQPLNDNLGSQTNLLNALANTNERYFTFYQPTMTLQNNVTITQNTAGVTFTEKQHNVAKEISYTVNVPANTQAYLSLFPTDFAQLESSTATVTVNGSSQQSQIGITGQYYNLGYYPKDTTVNFKVSFYGTKSVSFVQPQVVGLNTNAFEKAISAVQEKGVDLTTGKRSASGTFTADKDQVLVTTIPYDKGWRVKIDGKKVTPKAFKDAFLSVPVSAGTHTIQFSYLPEGLIPGIVLFVLCTGGFVAYVTLIPARRNRKKEDK

SEQ ID NO: 171 - DNA, 2520 bp, Enterococcus faecalis
atgaaaaataaaagtaggcagtttttaaaaaacaactggccttatatgttagccagtttcttcattccgtttttaattatggcaattatctatttgagtattgggatttatccaggaagtagtcgcagtgttttagccagcgatgccttttctcaattttcaaattttcacgcaagctttaacaatgttcttcatggaaaacaaagtcttttctatacgtggaatgcttctttgggactaaactacttgtccttaatttcctattatcttggtggcttatttacgccgctcgtctttttctttaacaatcaaaacatgcctgatgcgctctatttcctaacgttgttgaaaattgggagtgctggcttgagtttttggttcttggcaaaacaaacctttaagattcctaaatggtcccatgtgactttaagtgtgtcttatgcgctaatgtccttcattgtggcccattcagaattaattatgtggctggatgcctttatttatctgccactcgtaattttaggaattcatcgtttaatggaccaacgaaaaccgacattattgtttgtcagttatttcttgcttttcattacaaattattattttggctttatgattgggttgttttccttcctgtactattttgcacgaacgtttacagactggcaacgatataaatctcgaatcgttgcgtattttactacttctcttttagctggtggagcatctatgattatggtcttacctgctgtcttagatttacgaaccaatggtgaaactctttctgaaattacaacctttaaaacagaagcgactgcctttttagatattattatgaaaaatatgattggcgtttacgatacaaccaaatatgggtccattccttttatttacattgggttgttgcctttgattttttgtctcttctatttcgttacgaaagaaattccattgaaaaacaaactactttttggcagtttgtttgtcctattgattgctagcttttacatcacgcccttaaatttattctggcacggtatgcatgcgccgaacatgtttcttttccgctatagtttcctcttttcattcctagttattttgcttgctggttatggttgggaaaaatttgaaaaggatgatctcggcgtcttaagcggcttgattttgattcttttagcaatttttgctcttgcaatgggcacaaaaggtgctactagttatacgtatgtgactttaacctctttcgtattaacggcaacttttttgctattatactttttcgggattgctttttatcaattgaaaaaagcgcctatgcaatacttagtgattttgttattgctgctcgtttctggtgaagcaatcattaacacacgggcgatggtcactggtattttagatgattggaactacgcatcacgtagtttgtattctgaaccttatcctgacttaaaaaatctagtcgatcaaacaaaaaaagaaaatgatactttttatcgcttggaaaatttaaatggtgtttcggccaatgacggcattaactatggctacagtggcattagcatgttttcttccgtacggaaccgacattcttcaacatacctaaacgccttaggtttccgctcgcgaggcacgaatttaaatattcgttaccaaaataataccttgttaatggatgctttgatgggcattaaatacaatattgctgaaaacaatccaatgaaattcggctttgaacgacaagcagctgctggtaaatatcagctttatcgcaacgaaaatgctttgccgttaggatttttagcagacaaagagatttacaatgtccggcaacctctcaatgataatttaggtagtcaaacaaatttactaaatgctttagccaataccaatgaacggtattttaccttttatcaaccaacgatgacgcttcaaaataacgtgacaattacgcaaaatacagctggcgtaacttttacggagaaacaacataacgtagccaaagagatttcttatacagtcaatgtgcccgccaatacgcaagcttatttgagtttattcccaacggattttgctcaattggaaagttccactgcgacggtcaccgtgaacggctcgagtcagcaatcacaaattggcattactggccaatattataatttaggctactatccaaaagatacaaccgttaacttcaaagtaagtttttatggaaccaaagcagtaagttttgttcagccgcaagtagttggcttaaataccaatgcatttgaaaaagccatttccgccgtgcaagaaaaaggcgttgatttaaccactggcaaacgctctgcttcaggtacctttaccgccgacaaagatcaagtactcgtcactacaattccttatgacaaaggttggcgtgtcaaaattgatggcaaaaaagttaccccaaaagcctttaaagatgcctttctaagcgttcctgtcagcgctggaacccaatactattcaggttctcttatttaccagaaggattga

SEQ ID NO: 172 - protein, 839 aa, Enterococcus faecalis
MKNKSRQFLKNNWPYMLASFFIPFLIMAIIYLSIGIYPGSSRSVLASDAFSQFSNFHASFNNVLHGKQSLFYTWNASLGLNYLSLISYYLGGLFTPLVFFFNNQNMPDALYFLTLLKIGSAGLSFWFLAKQTFKIPKWSHVTLSVSYALMSFIVAHSELIMWLDAFIYLPLVILGIHRLMDQRKPTLLFVSYFLLFITNYYFGFMIGLFSFLYYFARTFTDWQRYKSRIVAYFTTSLLAGGASMIMVLPAVLDLRTNGETLSEITTFKTEATAFLDIIMKNMIGVYDTTKYGSIPFIYIGLLPLIFCLFYFVTKEIPLKNKLLFGSLFVLLIASFYITPLNLFWHGMHAPNMFLFRYSFLFSFLVILLAGYGWEKFEKDDLGVLSGLILILLAIFALAMGTKGATSYTYVTLTSFVLTATFLLLYFFGIAFYQLKKAPMQYLVILLLLLVSGEAIINTRAMVTGILDDWNYASRSLYSEPYPDLKNLVDQTKKENDTFYRLENLNGVSANDGINYGYSGISMFSSVRNRHSSTYLNALGFRSRGTNLNIRYQNNTLLMDALMGIKYNIAENNPMKFGFERQAAAGKYQLYRNENALPLGFLADKEIYNVRQPLNDNLGSQTNLLNALANTNERYFTFYQPTMTLQNNVTITQNTAGVTFTEKQHNVAKEISYTVNVPANTQAYLSLFPTDFAQLESSTATVTVNGSSQQSQIGITGQYYNLGYYPKDTTVNFKVSFYGTKAVSFVQPQVVGLNTNAFEKAISAVQEKGVDLTTGKRSASGTFTADKDQVLVTTIPYDKGWRVKIDGKKVTPKAFKDAFLSVPVSAGTQYYSGSLIYQKD

SEQ ID NO: 173 - DNA, 1710 bp, Enterococcus faecalis
atgaaaaataaaagtaggcagtttttaaaaaacaactggccttatatgttagccagtttcttcattccatttttaattatggcaattatctatttgagtattgggatttatccaggaagtagtcgcagtgttttagccagcgatgccttttctcaattttcaaattttcacgcaagctttaacaatgttcttcatggaaaacaaagtcttttctatacgtggaatgcttctttgggactaaactacttgtccttaatttcctattatcttggtggcttatttacgccgctcgtctttttctttaacaatcaaaacatgcctgatgcgctctatttcctaacgttgttgaaaattgggagtgctggcttgagtttttggttcttggcaaaacaaacctttaagattcctaaatggtcccatgtgactttaagtgtgtcttatgcgctaatgtccttcattgtggcccattcagaattaattatgtggctggatgcctttatttatctgccactcgtaattttaggaattcatcgtttaatggaccaacgaaaaccgacattattgtttgtcagttatttcttgcttttcattacaaattattattttggctttatgattgggttgttttccttcctgtactattttgcacgaacgtttacagactggcaacgatataaatctcgaatcgttgcgtattttactacttctcttttagctggtggagcatccatgattatggtcttacctgctgtcttagatttacgaaccaatggtgaaactctttctgaaattacaacctttaaaacagaagcgactgcctttttagatattattatgaaaaatatgattggcgtttacgatacaaccaaatatgggtccattccttttatttacattgggttgttgcctttgattttttgtctcttctatttcgttacgaaagaagttccattgaaaaacaaactactttttggcagtttgtttgtcctattgattgctagcttttacatcacgcccttaaatttattctggcacggtatgcatgcgccgaacatgtttcttttccgctatagtttcctcttttcattcctagttattttgcttgctggttatggttgggaaaaatttgaaaaggatgatctcggcgtcttaagcggcttgattttgattcttttagcaatttttgctcttgcaatgggcacaaaaggtgctactagttatacgtatgtgactttaacctctttcgtattaacggcaacttttttactattatactttttcgggattgctttttatcaattgaaaaaagcgcctatgcaatacttagtgattttgttattactgctcgtttctggtgaagcaatcattaatacacgggcgatggtcactggtattttagatgattggaactacgcatcacgcagcttgtattctgagccttaccctgacttaaaaaatctagtcgatcaaacaaaaaaagaaaatgataccttttatcgcttggaaaatttaaatggtgtttcggccaatgacggcattaactatggctacagtggcattagcatgttttcttccgtacggaaccgacattcttcaacatacctaaacgccttaggtttccgctcgcgaggcacgaatttaaatattcgttaccaaaataataccttgttaatggatgctttgatgggcattaaatacaatattgctgaa

SEQ ID NO: 174 - protein, 570 aa, Enterococcus faecalis
MKNKSRQFLKNNWPYMLASFFIPFLIMAIIYLSIGIYPGSSRSVLASDAFSQFSNFHASFNNVLHGKQSLFYTWNASLGLNYLSLISYYLGGLFTPLVFFFNNQNMPDALYFLTLLKIGSAGLSFWFLAKQTFKIPKWSHVTLSVSYALMSFIVAHSELIMWLDAFIYLPLVILGIHRLMDQRKPTLLFVSYFLLFITNYYFGFMIGLFSFLYYFARTFTDWQRYKSRIVAYFTTSLLAGGASMIMVLPAVLDLRTNGETLSEITTFKTEATAFLDIIMKNMIGVYDTTKYGSIPFIYIGLLPLIFCLFYFVTKEVPLKNKLLFGSLFVLLIASFYITPLNLFWHGMHAPNMFLFRYSFLFSFLVILLAGYGWEKFEKDDLGVLSGLILILLAIFALAMGTKGATSYTYVTLTSFVLTATFLLLYFFGIAFYQLKKAPMQYLVILLLLLVSGEAIINTRAMVTGILDDWNYASRSLYSEPYPDLKNLVDQTKKENDTFYRLENLNGVSANDGINYGYSGISMFSSVRNRHSSTYLNALGFRSRGTNLNIRYQNNTLLMDALMGIKYNIAE

SEQ ID NO: 175 - DNA, 2616 bp, Enterococcus faecalis
atgaaaaataaaagtaggcagtttttaaaaaacaactggccttatatgttagccagtttcttcattccatttttaattatggcaattatctatttgagtattgggatttatccaggaagtagtcgcagtgttttagccagcgatgccttttctcaattttcaaattttcacgcaagctttaacaatgttcttcatggaaaacaaagtcttttctatacgtggaatgcttctttgggactaaactacttgtccttaatttcctattatcttggtggcttatttacgccgctcgtctttttctttaacaatcaaaacatgcctgatgcgctctatttcctaacgttgttgaaaattgggagtgctggcttgagtttttggttcttggcaaaacaaacctttaagattcctaaatggtcccatgtgactttaagtgtgtcttatgcgctaatgtccttcattgtggcccattcagaattaattatgtggctggatgcctttatttatctgccactcgtaattttaggaattcatcgtttaatggaccaacgaaaaccgacattattgtttgtcagttatttcttgcttttcattacaaattattattttggctttatgattgggttgttttccttcctgtactattttgcacgaacgtttacagactggcaacgatataaatctcgaatcgttgcgtattttactacttctcttttagctggtggagcatccatgattatggtcttacctgctgtcttagatttacgaatcaatggtgaaactctttctgaaattacaacctttaaaacagaagcgactgcctttttagatattattatgaaaaatatgattggcgtttacgatacaaccaaatatgggtccattccttttatttacattgggttgttgcctttgattttttgtctcttctatttcgttacgaaagaagttccattgaaaaacaaactactttttggcagtttgtttgtcctattgattgctagcttttacatcacgcccttaaatttattctggcacggtatgcatgcgccgaacatgtttcttttccgctatagtttcctcttttcattcttagttattttgcttgcaggttatggttgggagaaatttgaaaaggatgatctcggtgtcttaagcggcttgattttgattcttttagcaatttttgctcttgcaatgggcacaaaaggtgctactagttatacgtatgtgactttaacctctttcgtattaacggcaacttttttactattatactttttcgggattgctttttatcaattgaaaaaagcgcctatgcaatacttagtgattttgttattgctgctcgtttctggtgaagcaatcattaacacacgggcgatggtcactggtattttagatgattggaactacgcatcacgcagcttgtattctgagccttatcctgacttaaaaaatctagtcgatcaaacaaaaaaagaaaatgataccttttaccgcttggaaaatttaaatggtgtttcggccaatgacggcattaactatggctacagtggcattagcatgttttcttccgtacggaaccgacattcttcaacatacctaaacgccttaggtttccgctcacgaggcacgaatttaaatattcgttaccaaaataataccttgttaatggatgctttgatgggcattaaatacaatattgctgaaaacaatccaatgaaattcggctttgagcgacaagctgctgctggtaaatatcagctttatcgtaacgaaaatgctttgccgttaggatttttagcagacaaagagatttacaatgtccggcaacctctcaatgataatttaggtagtcaaacaaatttactaaatgctttagccaatactaatgaacggtattttaccttttatcaaccaacgatgacgcttcaaaataacgtgacaattacgcaaaatacagctggcgtaacttttacggagaaacaacataacgtagccaaagagatttcttatacagtcaatgtgcccgccaatacgcaagcttatttgagtttattcccaacggattttgctcaattggaaagttccactgcgacggtcaccgtgaacggctcaagtcagcaatcacaaattggcattactggccaatattataacttaggttactatcccaaagatacaaccgttaacttcaaagtaagtttttatggaaccaaagcagtaagttttgttcagccgcaagtggttggcttaaataccaatgcatttgaaaaagccatttccgccgtgcaagaaaaaggcgttgatttaacaactggcaaacgctctgcttcaggtacctttaccgccgacaaagatcaagtactcgtcactacaattccttatgacaaaggttggcgtgtcaaaattgatggcaaaaaagttaccccaaaagcctttaaagatgcctttctaagcgttcctgtcagcgctggaacccatactattcagttctcttatttaccagaaggattgattcctggcatcgtgttattcgttctatgtactggtggtttcgttgcctacgtaaccttgattcctgctagacgaaaccgtaaaaaagaagacaaataa

SEQ ID NO: 176 - protein, 871 aa, Enterococcus faecalis
MKNKSRQFLKNNWPYMLASFFIPFLIMAIIYLSIGIYPGSSRSVLASDAFSQFSNFHASFNNVLHGKQSLFYTWNASLGLNYLSLISYYLGGLFTPLVFFFNNQNMPDALYFLTLLKIGSAGLSFWFLAKQTFKIPKWSHVTLSVSYALMSFIVAHSELIMWLDAFIYLPLVILGIHRLMDQRKPTLLFVSYFLLFITNYYFGFMIGLFSFLYYFARTFTDWQRYKSRIVAYFTTSLLAGGASMIMVLPAVLDLRINGETLSEITTFKTEATAFLDIIMKNMIGVYDTTKYGSIPFIYIGLLPLIFCLFYFVTKEVPLKNKLLFGSLFVLLIASFYITPLNLFWHGMHAPNMFLFRYSFLFSFLVILLAGYGWEKFEKDDLGVLSGLILILLAIFALAMGTKGATSYTYVTLTSFVLTATFLLLYFFGIAFYQLKKAPMQYLVILLLLLVSGEAIINTRAMVTGILDDWNYASRSLYSEPYPDLKNLVDQTKKENDTFYRLENLNGVSANDGINYGYSGISMFSSVRNRHSSTYLNALGFRSRGTNLNIRYQNNTLLMDALMGIKYNIAENNPMKFGFERQAAAGKYQLYRNENALPLGFLADKEIYNVRQPLNDNLGSQTNLLNALANTNERYFTFYQPTMTLQNNVTITQNTAGVTFTEKQHNVAKEISYTVNVPANTQAYLSLFPTDFAQLESSTATVTVNGSSQQSQIGITGQYYNLGYYPKDTTVNFKVSFYGTKAVSFVQPQVVGLNTNAFEKAISAVQEKGVDLTTGKRSASGTFTADKDQVLVTTIPYDKGWRVKIDGKKVTPKAFKDAFLSVPVSAGTHTIQFSYLPEGLIPGIVLFVLCTGGFVAYVTLIPARRNRKKEDK

SEQ ID NO: 177 - DNA, 2616 bp, Enterococcus faecalis
atgaaaaataaaagtaggcagtttttaaaaaacaactggccttatatgttagccagtttcttcattccatttttaattatggcaattatctatttgagtattgggatttatccaggaagtagtcgcagtgttttagccagcgatgccttttctcaattttcaaattttcacgcaagctttaacaatgttcttcatggaaaacaaagtcttttctatacgtggaatgcttctttgggactaaactacttgtccttaatttcctattatcttggtggcttatttacgccgctcgtctttttctttaacaatcaaaacatgcctgatgcgctctatttcctaacgttgttgaaaattgggagtgctggcttgagtttttggttcttggcaaaacaaacctttaagattcctaaatggtcccatgtgactttaagtgtgtcttatgcgctaatgtccttcattgtggcccattcagaattaattatgtggctggatgcctttatttatctgccactcgtaattttaggaattcatcgtttaatggaccaacgaaaaccgacattattgtttgtcagttatttcttgcttttcattacaaattattattttggctttatgattgggttgttttccttcctgtactattttgcacgaacgtttacagactggcaacgatataaatctcgaatcgttgcgtattttactacttctcttttagctggtggagcatccatgattatggtcttacctgctgtcttagatttacgatccaatggtgaaactctttctgaaattacaacctttaaaacagaagcgactgcctttttagatattattatgaaaaatatgattggcgtttacgatacaaccaaatatgggtccattccttttatttacattgggttgttgcctttgattttttgtctcttctatttcgttacgaaagaagttccattgaaaaacaaactactttttggcagtttgtttgtcctattgattgctagcttttacatcacgcccttaaatttattctggcacggtatgcatgcgccgaacatgtttcttttccgctatagtttcctcttttcattcttagttattttgcttgcaggttatggttgggagaaatttgaaaaggatgatctcggtgtcttaagcggcttgattttgattcttttagcaatttttgctcttgcaatgggcacaaaaggtgctactagttatacgtatgtgactttaacctctttcgtattaacggcaacttttttactattatactttttcgggattgctttttatcaattgaaaaaagcgcctatgcaatacttagtgattttgttattgctgctcgtttctggtgaagcaatcattaacacacgggcgatggtcactggtattttagatgattggaactacgcatcacgcagcttgtattctgagccttatcctgacttaaaaaatctagtcgatcaaacaaaaaaagaaaatgataccttttaccgcttggaaaatttaaatggtgtttcggccaatgacggcattaactatggctacagtggcattagcatgttttcttccgtacggaaccgacattcttcaacatacctaaacgccttaggtttccgctcacgaggcacgaatttaaatattcgttaccaaaataataccttgttaatggatgctttgatgggcattaaatacaatattgctgaaaacaatccaatgaaattcggctttgagcgacaagctgctgctggtaaatatcagctttatcgtaacgaaaatgctttgccgttaggatttttagcagacaaagagatttacaatgtccggcaacctctcaatgataatttaggtagtcaaacaaatttactaaatgctttagccaatactaatgaacggtattttaccttttatcaaccaacgatgacgcttcaaaataacgtgacaattacgcaaaatacagctggcgtaacttttacggagaaacaacataacgtagccaaagagatttcttatacagtcaatgtgcccgccaatacgcaagcttatttgagtttattcccaacggattttgctcaattggaaagttccactgcgacggtcaccgtgaacggctcaagtcagcaatcacaaattggcattactggccaatattataacttaggttactatcccaaagatacaaccgttaacttcaaagtaagtttttatggaaccaaagcagtaagttttgttcagccgcaagtggttggcttaaataccaatgcatttgaaaaagccatttccgccgtgcaagaaaaaggcgttgatttaacaactggcaaacgctctgcttcaggtacctttaccgccgacaaagatcaagtactcgtcactacaattccttatgacaaaggttggcgtgtcaaaattgatggcaaaaaagttaccccaaaagcctttaaagatgcctttctaagcgttcctgtcagcgctggaacccatactattcagttctcttatttaccagaaggattgattcctggcatcgtgttattcgttctatgtactggtggtttcgttgcctacgtaaccttgattcctgctagacgaaaccgtaaaaaagaagacaaataa

SEQ ID NO: 178 - protein, 871 aa, Enterococcus faecalis
MKNKSRQFLKNNWPYMLASFFIPFLIMAIIYLSIGIYPGSSRSVLASDAFSQFSNFHASFNNVLHGKQSLFYTWNASLGLNYLSLISYYLGGLFTPLVFFFNNQNMPDALYFLTLLKIGSAGLSFWFLAKQTFKIPKWSHVTLSVSYALMSFIVAHSELIMWLDAFIYLPLVILGIHRLMDQRKPTLLFVSYFLLFITNYYFGFMIGLFSFLYYFARTFTDWQRYKSRIVAYFTTSLLAGGASMIMVLPAVLDLRSNGETLSEITTFKTEATAFLDIIMKNMIGVYDTTKYGSIPFIYIGLLPLIFCLFYFVTKEVPLKNKLLFGSLFVLLIASFYITPLNLFWHGMHAPNMFLFRYSFLFSFLVILLAGYGWEKFEKDDLGVLSGLILILLAIFALAMGTKGATSYTYVTLTSFVLTATFLLLYFFGIAFYQLKKAPMQYLVILLLLLVSGEAIINTRAMVTGILDDWNYASRSLYSEPYPDLKNLVDQTKKENDTFYRLENLNGVSANDGINYGYSGISMFSSVRNRHSSTYLNALGFRSRGTNLNIRYQNNTLLMDALMGIKYNIAENNPMKFGFERQAAAGKYQLYRNENALPLGFLADKEIYNVRQPLNDNLGSQTNLLNALANTNERYFTFYQPTMTLQNNVTITQNTAGVTFTEKQHNVAKEISYTVNVPANTQAYLSLFPTDFAQLESSTATVTVNGSSQQSQIGITGQYYNLGYYPKDTTVNFKVSFYGTKAVSFVQPQVVGLNTNAFEKAISAVQEKGVDLTTGKRSASGTFTADKDQVLVTTIPYDKGWRVKIDGKKVTPKAFKDAFLSVPVSAGTHTIQFSYLPEGLIPGIVLFVLCTGGFVAYVTLIPARRNRKKEDK

SEQ ID NO: 179 - DNA, 1896 bp, Enterococcus faecalis
atgggaaaatatcatgaactagcagaaaaaattgtaaaaaatgtcggtgggcaagagaatattaatagtttgacacattgtatcacacgtcttcgcttcaaattaaaagatgagagtcaagcgaatgatgatgtcttaaaaaatatggacggtgtggtaactgttatgaaaagcggtggacaataccaagtcgttattgggaaccatgttccagccgtttacgaagaagtagttagtattgcaggcttgtcaggagaacgtgaagaagaagcttccagtgggaatttatttgatcgcttaatagatattttaagtggttgtttccaaccctttttaggggcgttagcagcggctgggatggtcaaagggttaaatgccttattggttttcttaaagctctatacggctacgtcagggacttataccatgttaaatgggattggcgatgcaattttctactttatgccagttattttaggttatacagcagctaaaaaattccggttgcatccaatggtagggatcgtgattggcgcagctttatgttacccaacgattcaaggaagtgcattacaaacggcctttgaaacaacagcgggtgcgggagccgcagcgccgtataatttattcggcttacctgcctatgatacatttattgggattccttgggtcggtgcgaactatacaagtagtgtcgtaccaatcatcttcattattgcttttgcggcacaagttcaaaaagtgtttaaacgtattattccagaagttgttcaaacgttcttagtaccgtttttcgtcttgttgattgccttaccaattggtttcttagtaattgggccaatcgttagcatgctaacagatttattaagcgctggctttacagcattaatgagtttctcaccagctttgtatggtttgattcttggtttcttctggcaagtcttagttatttttggtttacattggagcgttgtgccattagctattatgcaagtgacacaagaaggttcaagccaagtattaacgggatcatttgcagctagttttgcgcaaacagcggttgttttagcgatgttcttcaaattgaaagataaaaagttaaaagctttgtgtccgccagcaattatctctggtatttttggtgtaacagagccagcaatttatggaatcactttaccaaaaaaatggccatttatttattcaatgattggtggcgctgtcggtggtttatatttgatgatcaacaatgtgacagcttatacaatgggtggtttaggaatttttggtgtgctaaactttatcaatggtgatgatgcaagtgggatgatccagtcctttattgcaattgccattgcagcggtcgttggttttggtctaacattcttcttctggaaagacaatacagttgaggaagaagtgattattgataaaacaacgattaaaaaagaaaatattacaagtccagtcaaaggacgagtgttatctttaaaaaatgcagaggatcctgcttttgcaaatggagcattaggaaatggggtcgtgattgaaccaacggaaggtaaagtggttgcaccctttgatggaacgattgtcacactattcccaacaaaacatgcattaggtttgatttcagataacggcacagaattattgattcatattgggattgatacagttcaattagaaggcgaaggctttgaagcttttgtaaaacaaggtgaccgcgtgaaaaaaggtcaaacattagtaacctttgatttagaaggaattaaaaaagctgggtttagtacacaaattccaatcgttgtgacgaatacagcggattatttagatattttggaagtcggcagtaatgaagtttcaacaagtgatgatttgctgaccgctttaatataa

SEQ ID NO: 180 - protein, 631 aa, Enterococcus faecalis
MGKYHELAEKIVKNVGGQENINSLTHCITRLRFKLKDESQANDDVLKNMDGVVTVMKSGGQYQVVIGNHVPAVYEEVVSIAGLSGEREEEASSGNLFDRLIDILSGCFQPFLGALAAAGMVKGLNALLVFLKLYTATSGTYTMLNGIGDAIFYFMPVILGYTAAKKFRLHPMVGIVIGAALCYPTIQGSALQTAFETTAGAGAAAPYNLFGLPAYDTFIGIPWVGANYTSSVVPIIFIIAFAAQVQKVFKRIIPEVVQTFLVPFFVLLIALPIGFLVIGPIVSMLTDLLSAGFTALMSFSPALYGLILGFFWQVLVIFGLHWSVVPLAIMQVTQEGSSQVLTGSFAASFAQTAVVLAMFFKLKDKKLKALCPPAIISGIFGVTEPAIYGITLPKKWPFIYSMIGGAVGGLYLMINNVTAYTMGGLGIFGVLNFINGDDASGMIQSFIAIAIAAVVGFGLTFFFWKDNTVEEEVIIDKTTIKKENITSPVKGRVLSLKNAEDPAFANGALGNGVVIEPTEGKVVAPFDGTIVTLFPTKHALGLISDNGTELLIHIGIDTVQLEGEGFEAFVKQGDRVKKGQTLVTFDLEGIKKAGFSTQIPIVVTNTADYLDILEVGSNEVSTSDDLLTALI

SEQ ID NO: 181 - DNA, 1899 bp, Enterococcus faecalis
atgggaaaatatcatgaactagcagaaaaaattgtaaaaaatgtcggtgggcaagagaatattaatagtttgacacattgtatcacacgtcttcgcttcaaattaaaagatgagagtcaagcgaatgatgatgtcttaaaaaatatggacggtgtggtaactgttatgaaaagcggtggacaataccaagtcgttattgggaaccatgttccagccgtttacgaagaagtagttagtattgcaggcttgtcaggagaacgtgaagaagaagcttccagtgggaatttatttgatcgcttaatagatattttaagtggttgtttccaaccctttttaggggcgttagcagcggctgggatggtcaaagggttaaatgccttattggttttcttaaagctctatacggctacgtcagggacttataccatgttaaatgggattggcgatgcaattttctactttatgccagttattttaggttatacagcagctaaaaaattccggttgcatccaatggtagggatcgtgattggcgcagctttatgttacccaacgattcaaggaagtgcattacaaacggcctttgaaacaacagcgggtgcgggagccgcagcaccgtataatttattcggcttacctgcctataatacatttatggggattccttgggtcggtgcgaactatacaagtagtgtcgtaccaatcatcttcattattgcttttgcggcacaagttcaaaaagtgtttaaacggattattccagaagttgttcaaacgttcttagtaccgtttttcgtcttgttgattgccttaccaattggtttcttagtaattgggccaatcgttagcatgctaacagatttattaagcgctggctttacagcattaatgagtttctcaccagctttgtatggtttgattcttggtttcttctggcaagtcttagttatttttggtttacattggagcgttgtgccattagctattatgcaagtgacacaagaaggttcaagccaagtattaacgggatcatttgcagctagttttgcgcaaacagcggttgttttagcgatgttcttcaaattgaaagataaaaagttaaaagctttgtgtccgccagcaattatctctggtatttttggtgtaacagagccagcaatttatggaatcactttaccgaaaaaatggccatttatttattcaatgattggtggcgctgtcggtggtttatatttgatgatcaacaatgtgacagcttatacaatgggtggtttaggaattttcggtgtgctaaacttcatcaatggtgatgatgcaagtgggatgattcagtcctttattgcaattgccattgcagcggtcgttggttttggtctaacattcttcttctggaaagacaatacagttgaggaagaagaagtgattattgataaaacaacgattaaaaaagaaaatattacaagtccagtcaaaggacgagtgttatctttaaaaaatgcagaggatcctgcttttgcaaatggagcattaggaaatggggtcgtgattgaaccaacggaaggcaaagtggttgcaccctttgatggaacgattgtcacactattcccaacaaaacatgcattaggtttgatttcagataacggcacagaattattgattcatattgggattgatacagttcaattagaaggcgaaggctttgaagcttttgtaaaacaaggtgaccgcgtgaaaaaaggtcaaacattagtaacctttgatttagaaggaattaaaaaagctgggtttagtacacaaattccaatcgttgtgacgaatacagcggattatttagatattttggaagtcggcagtaatgaagtttcaacaagtgatgatttgctgaccgctttaatataa

SEQ ID NO: 182 - protein, 632 aa, Enterococcus faecalis; identical to SEQ ID NO: 66

SEQ ID NO: 183 - DNA, 1899 bp, Enterococcus faecalis
atgggaaaatatcatgaactagcagaaaaaattgtaaaaaatgtcggtgggcaagagaatattaatagtttgacacattgtatcacacgtcttcgcttcaaattaaaagatgagagtcaagcgaatgatgatgtcttaaaaaatatggacggtgtggtaactgttatgaaaagcggtggacaataccaagtcgttattgggaaccatgttccagccgtttacgaagaagtagttagtattgcaggcttgtcaggagaacgtgaagaagaagcttccagtgggaatttatttgatcgcttaatagatattttaagtggttgtttccaaccctttttaggggcgttagcagcggctgggatggtcaaagggttaaatgccttattggttttcttaaagctctatacggctacgtcagggacttataccatgttaaatgggattggcgatgcaattttctactttatgccagttattttaggttatacagcagctaaaaaattccggttgcatccaatggtagggatcgtgattggcgcagctttatgttacccaacgattcaaggaagtgcattacaaacggcctttgaaacaacagcgggtgcgggagccgcagcgccgtataatttattcggcttacctgcctatgatacatttatggggattccttgggtcggtgcgaactatacaagtagtgtcgtaccaatcatcttcattattgcttttgcggcacaagttcaaaaagtgtttaaacgtattattccagaagttgttcaaacgttcttagtaccgtttttcgtcttgttgattgccttaccaattggtttcttagtaattgggccaatcgttagcatgctaacagatttattaagcgctggctttacagcattaatgagtttctcaccagctttgtatggtttgattcttggtttcttctggcaagtcttagttatttttggtttacattggagcgttgtgccattagctattatgcaagtgacacaagaaggttcaagccaagtattaacgggatcatttgcagctagttttgcgcaaacagcggttgttttagcgatgttcttcaaattgaaagataaaaagttaaaagctttgtgtccgccagcaattatctctggtatttttggtgtaacagagccagcaatttatggaatcactttaccaaaaaaatggccatttatttattcaatgattggtggcgctgtcggtggtttatatttgatgatcaacaatgtgacagcttatacaatgggtggtttaggaattttcggtgtgctaaactttatcaatggtgatgatgcaagtgggatgattcagtcctttattgcaattgccattgcagcggtcgttggttttggtctaacattcttcttctggaaagacaatacagttgaggaagaagaagtgattattgataaaacaacgattaaaaaagaaaatattacaagtccagtcaaaggacgagtgttatctttaaaaaatgcagaggatcctgcttttgcaaatggagcattaggaaatggggtcgtgattgaaccaacggaaggtaaagtggttgcaccctttgatggaacgattgtcacactattcccaacaaaacatgcattaggtttgatttcagataacggcacagaattattgattcatattgggattgatacagttcaattagaaggcgaaggctttgaagcttttgtaaaacaaggtgaccgcgtgaaaaaaggtcaaacattagtaacctttgatttagaaggaattaaaaaagctgggtttagtacacaaatcccaatcgttgtgacgaatacagcggattatttagatattttggaagtcggcagtaatgaagtttcaacaagcgatgatttgctgaccgctttaatataa

SEQ ID NO: 184 - protein, 632 aa, Enterococcus faecalis
MGKYHELAEKIVKNVGGQENINSLTHCITRLRFKLKDESQANDDVLKNMDGVVTVMKSGGQYQVVIGNHVPAVYEEVVSIAGLSGEREEEASSGNLFDRLIDILSGCFQPFLGALAAAGMVKGLNALLVFLKLYTATSGTYTMLNGIGDAIFYFMPVILGYTAAKKFRLHPMVGIVIGAALCYPTIQGSALQTAFETTAGAGAAAPYNLFGLPAYDTFMGIPWVGANYTSSVVPIIFIIAFAAQVQKVFKRIIPEVVQTFLVPFFVLLIALPIGFLVIGPIVSMLTDLLSAGFTALMSFSPALYGLILGFFWQVLVIFGLHWSVVPLAIMQVTQEGSSQVLTGSFAASFAQTAVVLAMFFKLKDKKLKALCPPAIISGIFGVTEPAIYGITLPKKWPFIYSMIGGAVGGLYLMINNVTAYTMGGLGIFGVLNFINGDDASGMIQSFIAIAIAAVVGFGLTFFFWKDNTVEEEEVIIDKTTIKKENITSPVKGRVLSLKNAEDPAFANGALGNGVVIEPTEGKVVAPFDGTIVTLFPTKHALGLISDNGTELLIHIGIDTVQLEGEGFEAFVKQGDRVKKGQTLVTFDLEGIKKAGFSTQIPIVVTNTADYLDILEVGSNEVSTSDDLLTALI

SEQ ID NO: 185 - DNA, 1899 bp, Enterococcus faecalis
atgggaaaatatcatgaactagcagaaaaaattgtaaaaaatgtcggtgggcaagagaatattaatagtttgacacattgtatcacacgtcttcgcttcaaattaaaagatgagagtcaagcgaatgatgatgtcttaaaaaatatggacggtgtggtaactgttatgaaaagcggtggacaataccaagtcgttattgggaaccatgttccagccgtttacgaagaagtagttagtattgcaggcttgtcaggagaacgtgaagaagaagcttccagtgggaatttatttgatcgcttaatagatattttaagtggttgtttccaaccctttttaggggcgttagcagcggctgggatggtcaaagggttaaatgccttattggttttcttaaagctctatacggctacgtcagggacttataccatgttaaatgggattggcgatgcaattttctactttatgccagttattttaggttatacagcagctaaaaaattccggttgcatccaatggtagggatcgtgattggcgcagctttatgttacccaacgattcaaggaagtgcattacaaacggcctttgaaacaacagcgggtgcgggagccgcagcgccgtataatttattcggcttacctgcctatgatacatttatggggattccttgggtcggtgcgaactatacaagtagtgtcgtaccaatcatcttcattattgcttttgcggcacaagttcaaaaagtgtttaaacgtattattccagaagttgttcaaacgttcttagtaccgtttttcgtcttgttgattgccttaccaattggtttcttagtaattgggccaatcgttagcatgctaacagatttattaagcgctggctttacagcattaatgagtttctcaccagctttgtatggtttgattcttggtttcttctggcaagtcttagttatttttggtttacattggagcgttgtgccattagctattatgcaagtgacacaagaaggttcaagccaagtattaacgggatcatttgcagctagttttgcgcaaacagcggttgttttagcgatgttcttcaaattgaaagataaaaagttaaaagctttgtgtccgccagcaattatctctggtatttttggtgtaacagagccagcaatttatggaatcactttaccaaaaaaatggccatttatttattcaatgattggtggcgctgtcggtggtttatatttgatgatcaacaatgtgacagcttatacaatgggtggtttaggaattttcggtgtgctaaactttatcaatggtgatgatgcaagtgggatgattcagtcctttattgcaattgccattgcagcggtcgttggttttggtctaacattcttcttctggaaagacaatacagttgaggaagaagaagtgattattgataaaacaacgattaaaaaagaaaatattacaagtccagtcaaaggacgagtgttatctttaaaaaatgcagaggatcctgcttttgcaaatggagctttaggaaatggagtcgtgattgaaccaacggaaggtaaagtggttgcaccctttgatggaacgattgtcacactattcccaacaaaacatgcattaggtttgatttcagataacggcacagaattattgattcatattgggattgatacagttcaattagaaggcgaaggctttgaagcttttgtaaaacaaggtgaccgcgtgaaaaaaggtcaaacattagtaacctttgatttagaaggaattaaaaaagctgggtttagtacacaaattccaatcgttgtgacgaatacagcggattatttagatattttggaagtcggcagtaatgaagtttcaacaagtgatgatttgctgaccgctttaatataa

SEQ ID NO: 186 - protein, 632 aa, Enterococcus faecalis; identical to SEQ ID NO: 184

SEQ ID NO: 187 - DNA, 1899 bp, Enterococcus faecalis
atgggaaaatatcatgaactagcagaaaaaattgtaaaaaatgtcggtgggcaagagaatattaatagtttgacacattgtatcacacgtcttcgcttcaaattaaaagatgagagtcaagcgaatgatgatgtcttaaaaaatatggacggtgtggtaactgttatgaaaagcggtggacaataccaagtcgttattgggaaccatgttccagccgtttatgaagaagtagttagtattgcaggcttgtcaggagaacgtgaagaagaagcttccagtgggaatttatttgatcgcttaatagatattttaagtggttgtttccaaccctttttaggggcgttagcagcggctgggatggtcaaagggttaaatgccttattggttttcttaaagctctatacggctacgtcagggacttataccatgttaaatgggattggcgatgcaattttctactttatgccagttattttaggttatacagcagctaaaaaattccggttgcatccaatggtagggatcgtgattggcgcagctttatgttacccaacgattcaaggaagtgcattacaaacggcctttgaaacaacagcgggtgcgggagccgcagcgccgtataatttattcggcttacctgcctatgatacatttatggggattccttgggtcggtgcgaactatacaagtagtgtcgtaccaatcatcttcattattgcttttgcggcacaagttcaaaaagtgtttaaacgtattattccagaagttgttcaaacgttcttagtaccgtttttcgtcttgttgattgccttaccaattggtttcttagtaattgggccaatcgttagcatgctaacagatttattaagcgctggctttacagcattaatgagtttctcaccagctttgtatggtttgattcttggtttcttctggcaagtcttagttatttttggtttacattggagcgttgtgccattagctattatgcaagtgacacaagaaggttcaagccaagtattaacgggatcatttgcagctagttttgcgcaaacagcggttgttttagcgatgttcttcaaattgaaagataaaaagttaaaagctttgtgtccgccagcaattatctctggtatttttggtgtaacagagccagcaatttatggaatcactttaccaaaaaaatggccatttatttattcaatgattggtggtgctgtcggtggtttatatttgatgatcaacaatgtgacagcttatacaatgggtggtttaggaatttttggtgtgctaaactttatcaatggtgatgatgcaagtgggatgatccagtcctttattgcaattgccattgcagcggtcgttggttttggtctaacattcttcttctggaaagacaatacagttgaggaagaagaagtgattattgataaaacaacgattaaaaaagaaaatattacaagtccagtcaaaggacgagtgttatctttaaaaaatgcagaggatcctgcttttgcaaatggagcattaggaaatggggtcgtgattgaaccaacggaaggtaaagtggttgcaccctttgatggaacgattgtcacactattcccaacaaaacatgcattaggtttgatttcagataacggcacagaattattgattcatattgggattgatacagttcaattagaaggcgaaggctttgaagcttttgtaaaacaaggtgaccgcgtgaaaaaaggtcaaacattagtaacctttgatttagaaggaattaaaaaagctgggtttagtacacaaattccaatcgttgtgacgaatacagcggattatttagatattttggaagtcggcagtaatgaagtttcaacaagtgatgatttgctgaccgctttaatataa

SEQ ID NO: 188 - protein, 632 aa, Enterococcus faecalis; identical to SEQ ID NO: 184

SEQ ID NO: 189 - DNA, 1899 bp, Enterococcus faecalis
atgggaaaatatcatgaactagcagaaaaaattgtaaaaaatgtcggtgggcaagagaatattaatagtttgacacattgtatcacacgtcttcgcttcaaattaaaagatgagagtcaagcgaatgatgatgtcttaaaaaatatggatggtgtggtaactgttatgaaaagcggtggacaataccaagtcgttattgggaaccatgttccagccgtttatgaagaagtagttagtattgcaggcttgtcaggagaacgtgaagaagaagcttccagtgggaatttatttgatcgcttaatagatattttaagtggttgtttccaaccctttttaggggcgttagcagcggctgggatggtcaaagggttaaatgccttattggttttcttaaagctctatacggctacgtcagggacttataccatgttaaatgggattggcgatgcaattttctactttatgccagttattttaggttatacagcagctaaaaaattccggttgcatccaatggtagggatcgtgattggcgcagctttatgttacccaacgattcaaggaagtgcattacaaacggcctttgaaacaacagcgggtgccggagccgcagcaccgtataatttattcggtttacctgcctataatacatttatggggatcccttgggtcggtgcgaactatacaagtagtgtcgtaccaatcatcttcattattgcttttgcggcacaagttcaaaaagtgtttaaacgtattattccagaagttgttcaaacgttcttagtaccgtttttcgtcttgttgattgccttaccaattggtttcttagtaattgggccaatcgttagcatgctaacagatttattaagcgctggctttacagcattaatgagtttctcaccagctttgtatggtttgattcttggtttcttctggcaagtcttagttatttttggtttacattggagcgttgtgccattagctattatgcaagtgacacaagaaggttcaagccaagtattaacgggatcatttgcagctagttttgcgcaaacagcggttgttttagcgatgttcttcaaattgaaagataaaaagttaaaagctttgtgtccgccagcaattatctctggtatttttggtgtaacagagccagcaatttatggaatcactttaccaaaaaaatggccatttatttattcaatgattggtggcgctgtcggtggtttatatttgatgatcaacaatgtgacagcttatacaatgggtggtttaggaatttttggtgtgctaaactttatcaatggtgatgatgcaagtgggatgatccagtcctttattgcaattgccattgcagcggtcgttggttttggtctaacattcttcttctggaaagataatacagttgaggaagaagaagtgattattgataaaacaacgattaaaaaagaaaatattacaagtccagtcaaaggacgagtgttatctttaaaaaatgcagaggatcctgcttttgcaaatggagcattaggaaatggggtcgtgattgaaccaacggaaggcaaagtggtcgcaccctttgatggaacgattgtcacactattcccaacaaaacatgcattaggtttgatttcagataacggcacagaattattgattcatattgggattgatacagttcaattagaaggcgaaggctttgaagcttttgtaaaacaaggtgaccgcgtgaaaaaaggtcaaacattagtaacctttgatttagaaggaattaaaaaagctgggtttagtacacaaattccaatcgttgtgacgaatacagcggattatttagatattttggaagtcggcagtaatgaagtttcaacaagcgatgatttgctgaccgctttaatataa

SEQ ID NO: 190 - protein, 632 aa, Enterococcus faecalis; identical to SEQ ID NO: 66

SEQ ID NO: 191 - DNA, 1899 bp, Enterococcus faecalis
atgggaaaatatcatgaactagcagaaaaaattgtaaaaaatgtcggtgggcaagagaatattaatagtttgacacattgtatcacacgtcttcgcttcaaattaaaagatgagagtcaagcgaatgatgatgtcttaaaaaatatggacggtgtggtaactgttatgaaaagcggtggacaataccaagtcgttattgggaaccatgttccagccgtttacgaagaagtagttagtattgcaggcttgtcaggagaacgtgaagaagaagcttccagtgggaatttatttgatcgcttaatagatattttaagtggttgtttccaaccctttttaggggcgttagcagcggctgggatggtcaaagggttaaatgccttattggttttcttaaagctctatacggctacgtcagggacttataccatgttaaatgggattggcgatgcaattttctactttatgccagttattttaggttatacagcagctaaaaaattccggttgcatccaatggtagggatcgtgattggcgcagctttatgttacccaacgattcaaggaagtgcattacaaacggcctttgaaacaacagcgggtgcgggagccgcagcaccgtataatttattcggtttacctgcctataatacatttatggggatcccttgggtcggtgcgaactatacaagtagtgtcgtaccaatcatcttcattattgcttttgcggcacaagttcaaaaagtgtttaaacgtattattccagaagttgttcaaacgttcttagtaccgtttttcgtcttgttgattgccttaccaattggtttcttagtaattgggccaatcgttagcatgctaacagatttattaagcgctggctttacagcattaatgagtttctcaccagctttgtatggtttgattcttggtttcttctggcaagtcttagttatttttggtttacattggagcgttgtgccattagctattatgcaagtgacacaagaaggttcaagccaagtattaacgggatcatttgcagctagttttgcgcaaacagcggttgttttagcgatgttcttcaaattgaaagataaaaagttaaaagctttgtgtccgccagcaattatctctggtatttttggtgtaacagagccagcaatttatggaatcactttaccaaaaaaatggccatttatttattcaatgattggtggcgctgtcggtggtttatatttgatgatcaacaatgtgacagcttatacaatgggtggtttaggaattttcggtgtgctaaactttatcaatggtgatgatgcaagtgggatgattcagtcctttattgcaattgccattgcagcggtcgttggttttggtctaacattcttcttctggaaagacgatacagttgaggaagaagaagtgattattgataaaacaacgattaaaaaagaaaatattacaagtccagtcaaaggacgagtgttatctttaaaaaatgcagaggatcctgcttttgcaaatggagcattaggaaatggggtcgtgattgaaccaacggaaggtaaagtggttgcaccctttgatggaacgattgtcacactattcccaacaaaacatgcattaggtttgatttcagataacggcacagaattattgattcatattgggattgatacagttcaattagaaggcgaaggctttgaagcttttgtaaaacaaggtgaccgcgtgaaaaaaggtcaaacattagtaacctttgatttagaaggaattaaaaaagctgggtttagtacacaaattccaatcgttgtgacgaatacagcggattatttagatattttggaagtcggcagtaatgaagtttcaacaagcgatgatttgctgaccgctttaatataa

SEQ ID NO: 192 - protein, 632 aa, Enterococcus faecalis
MGKYHELAEKIVKNVGGQENINSLTHCITRLRFKLKDESQANDDVLKNMDGVVTVMKSGGQYQVVIGNHVPAVYEEVVSIAGLSGEREEEASSGNLFDRLIDILSGCFQPFLGALAAAGMVKGLNALLVFLKLYTATSGTYTMLNGIGDAIFYFMPVILGYTAAKKFRLHPMVGIVIGAALCYPTIQGSALQTAFETTAGAGAAAPYNLFGLPAYNTFMGIPWVGANYTSSVVPIIFIIAFAAQVQKVFKRIIPEVVQTFLVPFFVLLIALPIGFLVIGPIVSMLTDLLSAGFTALMSFSPALYGLILGFFWQVLVIFGLHWSVVPLAIMQVTQEGSSQVLTGSFAASFAQTAVVLAMFFKLKDKKLKALCPPAIISGIFGVTEPAIYGITLPKKWPFIYSMIGGAVGGLYLMINNVTAYTMGGLGIFGVLNFINGDDASGMIQSFIAIAIAAVVGFGLTFFFWKDDTVEEEEVIIDKTTIKKENITSPVKGRVLSLKNAEDPAFANGALGNGVVIEPTEGKVVAPFDGTIVTLFPTKHALGLISDNGTELLIHIGIDTVQLEGEGFEAFVKQGDRVKKGQTLVTFDLEGIKKAGFSTQIPIVVTNTADYLDILEVGSNEVSTSDDLLTALI

SEQ ID NO: 193 - DNA, 1899 bp, Enterococcus faecalis; identical to SEQ ID NO: 191

SEQ ID NO: 194 - protein, 632 aa, Enterococcus faecalis; identical to SEQ ID NO: 192

SEQ ID NO: 195 - DNA, 1899 bp, Enterococcus faecalis
atgggaaaatatcatgaactagcagaaaaaattgtaaaaaatgtcggtgggcaagagaatattaatagtttgacacattgtatcacacgtcttcgcttcaaattaaaagatgagagtcaagcgaatgatgatgtcttaaaaaatatggacggtgtggtaactgttatgaaaagcggtggacaataccaagtcgttattgggaaccatgttccagccgtttatgaagaagtagttagtattgcaggcttgtcaggagaacgtgaagaagaagcttccagcgggaatttatttgatcgcttaatagatattttaagtggttgtttccaaccctttttaggggcgttagcagcggctgggatggttaaagggttaaatgccttattggttttcttaaagctctatacggctacgtcagggacttataccatgttaaatgggattggcgatgcaattttctactttatgccagttattttaggttatacagcagctaaaaaattccggttgcatccaatggtagggatcgtgattggtgcagctttatgttacccaacgattcaaggaagtgcattacaaacggcctttgaaacaacagcgggtgccggagccgcagcaccgtataatttattcggcttacctgcctataatacatttatggggattccttgggtcggtgcgaactatacaagtagtgtcgtaccaatcatcttcattattgcttttgcggcacaagttcaaaaagtgtttaaacggattattccagaagttgttcaaacgttcttagtaccgtttttcgtcttgttgattgccttaccaattggtttcttagtaattgggccaatcgttagcatgctaacagatttattaagcgctggctttacagcattaatgagtttctcaccagctttgtatggtttgattcttggtttcttctggcaagtcttagttatttttggtttacattggagcgttgtgccattagctattatgcaagtgacacaagaaggctcaagccaagtattaacgggatcatttgcagctagttttgcgcaaacagcggttgttttagcgatgttcttcaaattgaaagataaaaagttaaaagctttgtgtccgccagcaattatctctggtatttttggtgtaacagagccagcgatttatggaatcactttaccgaaaaaatggccatttatttattcaatgattggtggcgctgtcggtggtttatatttgatgatcaacaatgtgacagcttatacaatgggtggtttaggaattttcggtgtgctaaactttatcaatggtgatgatgcaagtgggatgattcagtcctttattgcaattgccattgcagcggtcgttggttttggtctaacattcttcttctggaaagacaatacagttgaggaagaagaagtgattattgataaaacaacgattaaaaaagaaaatattacaagtccagtcaaaggacgagtgttctctttaaaaaatgcagagcatcctgcttttgcaaatggagcattaggaaatggggtcgtgattgaaccaacggaaggcaaagtggttgcaccctttgatggaacgattgtcacactattcccaacaaaacacgcattaggtttgatttcagataacggcacagaattattgattcatattgggattgatacagttcaattagaaggcgaaggctttgaagcttttgtaaaacaaggtgaccgcgtgaaaaaaggtcaaacattagtaacctttgatttagaaggaattaaaaaagctgggtttagtacacaaattccaatcgttgtgacgaatacagcggattatttagatattttggaagtcggcagtaatgaagtttcaacaagtgatgatttgctgaccgctttaatataa

SEQ ID NO: 196 - protein, 632 aa, Enterococcus faecalis
MGKYHELAEKIVKNVGGQENINSLTHCITRLRFKLKDESQANDDVLKNMDGVVTVMKSGGQYQVVIGNHVPAVYEEVVSIAGLSGEREEEASSGNLFDRLIDILSGCFQPFLGALAAAGMVKGLNALLVFLKLYTATSGTYTMLNGIGDAIFYFMPVILGYTAAKKFRLHPMVGIVIGAALCYPTIQGSALQTAFETTAGAGAAAPYNLFGLPAYNTFMGIPWVGANYTSSVVPIIFIIAFAAQVQKVFKRIIPEVVQTFLVPFFVLLIALPIGFLVIGPIVSMLTDLLSAGFTALMSFSPALYGLILGFFWQVLVIFGLHWSVVPLAIMQVTQEGSSQVLTGSFAASFAQTAVVLAMFFKLKDKKLKALCPPAIISGIFGVTEPAIYGITLPKKWPFIYSMIGGAVGGLYLMINNVTAYTMGGLGIFGVLNFINGDDASGMIQSFIAIAIAAVVGFGLTFFFWKDNTVEEEEVIIDKTTIKKENITSPVKGRVFSLKNAEHPAFANGALGNGVVIEPTEGKVVAPFDGTIVTLFPTKHALGLISDNGTELLIHIGIDTVQLEGEGFEAFVKQGDRVKKGQTLVTFDLEGIKKAGFSTQIPIVVTNTADYLDILEVGSNEVSTSDDLLTALI

SEQ ID NO: 197 - DNA, 1896 bp, Enterococcus faecalis
atgggaaaatatcatgaactagcagaaaaaattgtaaaaaatgtcggtgggcaagagaatattaatagtttgacacattgtatcacacgtcttcgcttcaaattaaaagatgagagtcaagcgaatgatgatgtcttaaaaaatatggacggtgtggtaactgttatgaaaagcggtggacaataccaagtcgttattgggaaccatgttccagccgtttacgaagaagtagttagtattgcaggcttgtcaggagaacgtgaagaagaagcttccagtgggaatttatttgatcgcttaatagatattttaagtggttgtttccaaccctttttaggggcgttagcagcggctgggatggtcaaagggttaaatgccttattggttttcttaaagctctatacggctacgtcagggacttataccatgttaaatgggattggcgatgcaattttctactttatgccagttattttaggttatacagcagctaaaaaattccggttgcatccaatggtagggatcgtgattggcgcagctttatgttacccaacgattcaaggaagtgcattacaaacggcctttgaaacaacagcgggtgcgggagccgcagcgccgtataatttattcggcttacctgcctatgatacatttatggggattccttgggtcggtgcgaactatacaagtagtgtcgtaccaatcatcttcattattgcttttgcggcacaagttcaaaaagtgtttaaacgtattattccagaagttgttcaaacgttcttagtaccgtttttcgtcttgttgattgccttaccaattggtttcttagtaattgggccaatcgttagcatgctaacagatttattaagcgctggctttacagcattaatgagtttctcaccagctttgtatggtttgattcttggtttcttctggcaagtcttagttatttttggtttacattggagcgttgtgccattagctattatgcaagtgacacaagaaggttcaagccaagtattaacgggatcatttgcagctagttttgcgcaaacagcggttgttttagcgatgttcttcaaattgaaagataaaaagttaaaagctttgtgtccgccagcaattatctctggtatttttggtgtaacagagccagcaatttatggaatcactttaccaaaaaaatggccatttatttattcaatgattggtggcgctgtcggtggtttatatttgatgatcaacaatgtgacagcttatacaatgggtggtttaggaatttttggtgtgctaaactttatcaatggtgatgatgcaagtgggatgatccagtcctttattgcaattgccattgcagcggtcgttggttttggtctaacattcttcttctggaaagacaatacagttgaggaagaagtgattattgataaaacaacgattaaaaaagaaaatattacaagtccagtcaaaggacgagtgttatctttaaaaaatgcagaggatcctgcttttgcaaatggagcattaggaaatggggtcgtgattgaaccaacggaaggtaaagtggttgcaccctttgatggaacgattgtcacactattcccaacaaaacatgcattaggtttgatttcagataacggcacagaattattgattcatattgggattgatacagttcaattagaaggcgaaggctttgaagcttttgtaaaacaaggtgaccgcgtgaaaaaaggtcaaacattagtaacctttgatttagaaggaattaaaaaagctgggtttagtacacaaattccaatcgttgtgacgaatacagcggattatttagatattttggaagtcggcagtaatgaagtttcaacaagtgatgatttgctgaccgctttaatataa

SEQ ID NO: 198 - protein, 631 aa, Enterococcus faecalis
MGKYHELAEKIVKNVGGQENINSLTHCITRLRFKLKDESQANDDVLKNMDGVVTVMKSGGQYQVVIGNHVPAVYEEVVSIAGLSGEREEEASSGNLFDRLIDILSGCFQPFLGALAAAGMVKGLNALLVFLKLYTATSGTYTMLNGIGDAIFYFMPVILGYTAAKKFRLHPMVGIVIGAALCYPTIQGSALQTAFETTAGAGAAAPYNLFGLPAYDTFMGIPWVGANYTSSVVPIIFIIAFAAQVQKVFKRIIPEVVQTFLVPFFVLLIALPIGFLVIGPIVSMLTDLLSAGFTALMSFSPALYGLILGFFWQVLVIFGLHWSVVPLAIMQVTQEGSSQVLTGSFAASFAQTAVVLAMFFKLKDKKLKALCPPAIISGIFGVTEPAIYGITLPKKWPFIYSMIGGAVGGLYLMINNVTAYTMGGLGIFGVLNFINGDDASGMIQSFIAIAIAAVVGFGLTFFFWKDNTVEEEVIIDKTTIKKENITSPVKGRVLSLKNAEDPAFANGALGNGVVIEPTEGKVVAPFDGTIVTLFPTKHALGLISDNGTELLIHIGIDTVQLEGEGFEAFVKQGDRVKKGQTLVTFDLEGIKKAGFSTQIPIVVTNTADYLDILEVGSNEVSTSDDLLTALI

SEQ ID NO: 199 - DNA, 1899 bp, Enterococcus faecalis; identical to SEQ ID NO: 46

SEQ ID NO: 200 - protein, 632 aa, Enterococcus faecalis; identical to SEQ ID NO: 66

SEQ ID NO: 201 - DNA, 1899 bp, Enterococcus faecalis
atgggaaaatatcatgaactagcagaaaaaattgtaaaaaatgtcggtgggcaagagaatattaatagtttgacacattgtatcacacgtcttcgcttcaaattaaaagatgagagtcaagcgaatgatgatgtcttaaaaaatatggacggtgtggtaactgttatgaaaagcggtggacaataccaagtcgttattgggaaccatgttccagccgtttacgaagaagtagttagtattgcaggcttgtcaggagaacgtgaagaagaagcttccagtgggaatttatttgatcgcttaatagatattttaagtggttgtttccaaccctttttaggggcgttagcagcggctgggatggtcaaagggttaaatgccttattggttttcttaaagctctatacggctacgtcagggacttataccatgttaaatgggattggcgatgcaattttctactttatgccagttattttaggttatacagcagctaaaaaattccggttgcatccaatggtagggatcgtgattggcgcagctttatgttacccaacgattcaaggaagtgcattacaaacggcctttgaaacaacagcgggtgccggagccgcagcaccgtataatttattcggcttacctgcctataatacatttatggggattccttgggtcggtgcgaactatacaagtagtgtcgtaccaatcatcttcattattgcttttgcggcacaagttcaaaaagtgtttaaacgtattattccagaagttgttcaaacgttcttagtaccgttttttgtcttgttgattgccttaccaattggtttcttagtaattgggccaatcgttagcatgctaacagatttattaagcgctggctttacagcattaatgagtttctcaccagctttgtatggtttgattcttggtttcttctggcaagtcttagttatttttggtttacattggagcgttgtgccattagctattatgcaagtgacacaagaaggttcaagccaagtattaacgggatcatttgcagctagttttgcgcaaacagcggttgttttagcgatgttcttcaaattgaaagataaaaagttaaaagctttgtgtccgccagcaattatctctggtatttttggtgtaacagagccagcgatttatggaatcactttaccgaaaaaatggccatttatttattcaatgattggtggcgctgtcggtggtttatatttgatgatcaataatgtgacagcatatacaatgggtggtttaggaattttcggtgtgctaaactttatcaatggtgatgatgcaagtgggatgattcagtcctttattgcaattgccattgcagcgctcgttggttttggtctaacattcttcttctggaaagacaatacagttgaggaagaagaagtgattattgataaaacaacgattaaaaaagaaaatattacaagtccagtcaaaggacgagtgttatctttaaaaaatgcagaggatcctgcttttgcaaatggagctttaggaaatggggtcgtgattgaaccaacggaaggtaaagtggttgcaccctttgatggaacgattgtcacactattcccaacaaaacatgcattaggtttgatttcagataacggcacagaattattgattcatattgggattgatacagttcaattagaaggtgaaggctttgaagcttttgtaaaacaaggtgaccgcgtgaaaaaaggtcaaacattagtaacctttgatttagaaggaattaaaaaagctgggtttagtacacaaatcccaatcgttgtgacgaatacagcggattatttagatattttggaagtcggcagtaatgaagtttcaacaagcgatgatttgctgaccgctttaatataa

SEQ ID NO: 202 - protein, 632 aa, Enterococcus faecalis
MGKYHELAEKIVKNVGGQENINSLTHCITRLRFKLKDESQANDDVLKNMDGVVTVMKSGGQYQVVIGNHVPAVYEEVVSIAGLSGEREEEASSGNLFDRLIDILSGCFQPFLGALAAAGMVKGLNALLVFLKLYTATSGTYTMLNGIGDAIFYFMPVILGYTAAKKFRLHPMVGIVIGAALCYPTIQGSALQTAFETTAGAGAAAPYNLFGLPAYNTFMGIPWVGANYTSSVVPIIFIIAFAAQVQKVFKRIIPEVVQTFLVPFFVLLIALPIGFLVIGPIVSMLTDLLSAGFTALMSFSPALYGLILGFFWQVLVIFGLHWSVVPLAIMQVTQEGSSQVLTGSFAASFAQTAVVLAMFFKLKDKKLKALCPPAIISGIFGVTEPAIYGITLPKKWPFIYSMIGGAVGGLYLMINNVTAYTMGGLGIFGVLNFINGDDASGMIQSFIAIAIAALVGFGLTFFFWKDNTVEEEEVIIDKTTIKKENITSPVKGRVLSLKNAEDPAFANGALGNGVVIEPTEGKVVAPFDGTIVTLFPTKHALGLISDNGTELLIHIGIDTVQLEGEGFEAFVKQGDRVKKGQTLVTFDLEGIKKAGFSTQIPIVVTNTADYLDILEVGSNEVSTSDDLLTALI

SEQ ID NO: 203 - DNA, 1896 bp, Enterococcus faecalis
atgggaaaatatcatgaactagcagaaaaaattgtaaaaaatgtcggtgggcaagagaatattaatagtttgacacattgtatcacacgtcttcgcttcaaattaaaagatgagagtcaagcgaatgatgatgtcttaaaaaatatggacggtgtggtaactgttatgaaaagcggtggacaataccaagtcgttattgggaaccatgttccagccgtttacgaagaagtagttagtattgcaggcttgtcaggagaacgtgaagaagaagcttccagtgggaatttatttgatcgcttaatagatattttaagtggttgtttccaaccctttttaggggcgttagcagcggctgggatggtcaaagggttaaatgccttattggttttcttaaagctctatacggctacgtcagggacttataccatgttaaatgggattggcgatgcaattttctactttatgccagttattttaggttatacagcagctaaaaaattccggttgcatccaatggtagggatcgtgattggcgcagctttatgttacccaacgattcaaggaagtgcattacaaacggcctttgaaacaacagcgggtgcgggagccgcagcgccgtataatttattcggcttacctgcctatgatacatttatggggattccttgggtcggtgcgaactatacaagtagtgtcgtaccaatcatcttcattattgcttttgcggcacaagttcaaaaagtgtttaaacgtattattccagaagttgttcaaacgttcttagtaccgtttttcgtcttgttgattgccttaccaattggtttcttagtaattgggccaatcgttagcatgctaacagatttattaagcgctggctttacagcattaatgagtttctcaccagctttgtatggtttgattcttggtttcttctggcaagtcttagttatttttggtttacattggagcgttgtgccattagctattatgcaagtgacacaagaaggttcaagccaagtattaacgggatcatttgcagctagttttgcgcaaacagcggttgttttagcgatgttcttcaaattgaaagataaaaagttaaaagctttgtgtccgccagcaattatctctggtatttttggtgtaacagagccagcaatttatggaatcactttaccaaaaaaacggccatttatttattcaatgattggtggcgctgtcggtggtttatatttgatgatcaacaatgtgacagcttatacaatgggtggtttaggaatttttggtgtgctaaactttatcaatggtgatgatgcaagtgggatgatccagtcctttattgcaattgccattgcagcggtcgttggttttggtctaacattcttcttctggaaagacaatacagttgaggaagaagtgattattgataaaacaacgattaaaaaagaaaatattacaagtccagtcaaaggacgagtgttatctttaaaaaatgcagaggatcctgcttttgcaaatggagcattaggaaatggggtcgtgattgaaccaacggaaggtaaagtggttgcaccctttgatggaacgattgtcacactattcccaacaaaacatgcattaggtttgatttcagataacggcacagaattattgattcatattgggattgatacagttcaattagaaggcgaaggctttgaagcttttgtaaaacaaggtgaccgcgtgaaaaaaggtcaaacattagtaacctttgatttagaaggaattaaaaaagctgggtttagtacacaaattccaatcgttgtgacgaatacagcggattatttagatattttggaagtcggcagtaatgaagtttcaacaagtgatgatttgctgaccgctttaatataa

SEQ ID NO: 204 - protein, 631 aa, Enterococcus faecalis
MGKYHELAEKIVKNVGGQENINSLTHCITRLRFKLKDESQANDDVLKNMDGVVTVMKSGGQYQVVIGNHVPAVYEEVVSIAGLSGEREEEASSGNLFDRLIDILSGCFQPFLGALAAAGMVKGLNALLVFLKLYTATSGTYTMLNGIGDAIFYFMPVILGYTAAKKFRLHPMVGIVIGAALCYPTIQGSALQTAFETTAGAGAAAPYNLFGLPAYDTFMGIPWVGANYTSSVVPIIFIIAFAAQVQKVFKRIIPEVVQTFLVPFFVLLIALPIGFLVIGPIVSMLTDLLSAGFTALMSFSPALYGLILGFFWQVLVIFGLHWSVVPLAIMQVTQEGSSQVLTGSFAASFAQTAVVLAMFFKLKDKKLKALCPPAIISGIFGVTEPAIYGITLPKKRPFIYSMIGGAVGGLYLMINNVTAYTMGGLGIFGVLNFINGDDASGMIQSFIAIAIAAVVGFGLTFFFWKDNTVEEEVIIDKTTIKKENITSPVKGRVLSLKNAEDPAFANGALGNGVVIEPTEGKVVAPFDGTIVTLFPTKHALGLISDNGTELLIHIGIDTVQLEGEGFEAFVKQGDRVKKGQTLVTFDLEGIKKAGFSTQIPIVVTNTADYLDILEVGSNEVSTSDDLLTALI

SEQ ID NO: 205 - DNA, 1899 bp, Enterococcus faecalis
atgggaaaatatcatgaactagcagaaaaaattgtaaaaaatgtcggtgggcaagagaatattaatagtttgacacattgtatcacacgtcttcgcttcaaattaaaagatgagagtcaagcgaatgatgatgtcttaaaaaatatggacggtgtggtaactgttatgaaaagcggtggacaataccaagtcgttattgggaaccatgttccagccgtttacgaagaagtagttagtattgcaggcttgtcaggagaacgtgaagaagaagcttccagcgggaatttatttgatcgcttaatagatattttaagtggttgtttccaaccctttttaggggcgttagcagcggctgggatggtcaaagggttaaatgccttattggttttcttaaagctctatacggctacgtcagggacttataccatgttaaatgggattggcgatgcaattttctactttatgccagttattttaggttatacagcagctaaaaaattccggttgcatccaatggtagggatcgtgattggtgcagctttatgttacccaacgattcaaggaagtgcattacaaacggcctttgaaacaacagcgggtgccggagccgcagcaccgtataatttattcggcttacctgcctataatacatttatggggattccttgggtcggtgcgaactatacaagtagtgtcgtaccaatcatcttcattattgcttttgcggcacaagttcaaaaagtgtttaaacgtattattccagaagttgttcaaacgttcttagtaccgtttttcgtcttgttgattgccttaccaattggtttcttagtaattgggccaatcgttagcatgctaacagatttattaagcgctggctttacagcattaatgagtttctcaccagctttgtatggtttgattcttggtttcttctggcaagtcttagttatttttggtttacattggagcgttgtgccattagctattatgcaagtgacacaagaaggttcaagccaagtattaacgggatcatttgcagctagttttgcgcaaacagcggttgttttagcgatgttcttcaaattgaaagataaaaagttaaaagctttgtgtccgccagcaattatctctggtatttttggtgtaacagagccagcaatttatggaatcactttaccaaaaaaatggccatttatttattcaatgattggtggcgctgtcggtggtttatatttgatgatcaacaatgtgacagcttatacaatgggtggtttaggaattttcggtgtgctaaactttatcaatggtgatgatgcaagtgggatgattcagtcctttattgcaattgccattgcagcggtcgttggttttggtctaacattcttcttctggaaagacaatacagttgaggaagaagaagtgattattgataaaacaacgattaaaaaagaaaatattacaagtccagtcaaaggacgagtgttatctttaaaaaatgcagaggatcctgcttttgcgaatggagcattaggaaatggggtcgtgattgaaccaacggaaggcaaagtggttgcaccctttgatggaacgattgtcacactattcccaacaaaacatgcattaggtttgatttcagataacggcacagaattattgattcatattgggattgatacagttcaattagaaggcgaaggctttgaagcttttgtaaaacaaggtgaccgcgtgaaaaaaggtcaaacattagtaacctttgatttagaaggaattaaaaaagctgggtttagtacacaaattccaatcgttgtgacgaatacagcggattatttagatattttggaagtcggcagtaatgaagtttcaacaagtgatgatttgctgaccgctttaatataa

SEQ ID NO: 206 - protein, 632 aa, Enterococcus faecalis; identical to SEQ ID NO: 66

SEQ ID NO: 207 - DNA, 1896 bp, Enterococcus faecalis
atgggaaaatatcatgaactagcagaaaaaattgtaaaaaatgtcggtgggcaagagaatattaatagtttgacacattgtatcacacgtcttcgctttaaattaaaagatgagagtcaagcgaatgatgatgtcttaaaaaatatggacggtgtggtaactgttatgaaaagcggtggacaataccaagtcgttattgggaaccatgttccagccgtttacgaagaagtagttagtattgcaggcttgtcaggagaacgtgaagaagaagcttccagtgggaatttatttgatcgcttaatagatattttaagtggttgtttccaaccctttttaggggcgttagcagcggctgggatggtcaaagggttaaatgccttattggttttcttaaagctctatacggctacgtcagggacttataccatgttaaatgggattggcgatgcaattttctactttatgccagttattttaggttatacagcagctaaaaaattccggttgcatccaatggtagggatcgtgattggcgcagctttatgttacccaacgattcaaggaagtgcattacaaacggcctttgaaacaacagcgggtgcgggagccgcagcgccgtataatttattcggcttacctgcctatgatacatttatggggattccttgggtcggtgcgaactatacaagtagtgtcgtaccaatcatcttcattattgcttttgcggcacaagttcaaaaagtgtttaaacgtattattccagaagttgttcaaacgttcttagtaccgtttttcgtcttgttgattgccttaccaattggtttcttagtaattgggccaatcgttagcatgctaacagatttattaagcgctggctttacagcattaatgagtttctcaccagctttgtatggtttgattcttggtttcttctggcaagtcttagttatttttggtttacattggagcgttgtgccattagctattatgcaagtgacacaagaaggttcaagccaagtattaacgggatcatttgcagctagttttgcgcaaacagcggttgttttagcgatgttcttcaaattgaaagataaaaagttaaaagctttgtgtccgccagcaattatctctggtatttttggtgtaacagagccagcaatttatggaatcactttaccaaaaaaatggccatttatttattcaatgattggtggcgctgtcggtggtttatatttgatgatcaacaatgtgacagcttatacaatgggtggtttaggaatttttggtgtgctaaactttatcaatggtgatgatgcaagtgggatgatccagtcctttattgcaattgccattgcagcggtcgttggttttggtctaacattcttcttctggaaagacaatacagttgaggaagaagtgattattgataaaacaacgattaaaaaagaaaatattacaagtccagtcaaaggacgagtgttatctttaaaaaatgcagaggatcctgcttttgcaaatggagcattaggaaatggggtcgtgattgaaccaacggaaggtaaagtggttgcaccctttgatggaacgattgtcacactattcccaacaaaacatgcattaggtttgatttcagataacggcacagaattattgattcatattgggattgatacagttcaattagaaggcgaaggctttgaagcttttgtaaaacaaggtgaccgcgtgaaaaaaggtcaaacattagtaacctttgatttagaaggaattaaaaaagctgggtttagtacacaaattccaatcgttgtgacgaatacagcggattatttagatattttggaagtcggcagtaatgaagtttcaacaagtgatgatttgctgaccgctttaatataa

SEQ ID NO: 208 - protein, 631 aa, Enterococcus faecalis; identical to SEQ ID NO: 198

SEQ ID NO: 209 - DNA, 1896 bp, Enterococcus faecalis; identical to SEQ ID NO: 197

SEQ ID NO: 210 - protein, 631 aa, Enterococcus faecalis; identical to SEQ ID NO: 198

SEQ ID NO: 211 - DNA, 1366 bp, Enterococcus faecalis
atgggaaaatatcatgaactagcagaaaaaattgtaaaaaatgtcggtgggcaagagaatattaatagtttgacacattgtatcacacgtcttcgcttcaaattaaaagatgagagtcaagcgaatgatgatgtcttaaaaaatatggacggtgtggtaactgttatgaaaagcggtggacaataccaagtcgttattgggaaccatgttccagccgtttacgaagaagtagttagtattgcaggcttgtcaggagaacgtgaagaagaagcttccagtgggaatttatttgatcgcttaatagatattttaagtggttgtttccaaccctttttaggggcgttagcagcggctgggatggtcaaagggttaaatgccttattggttttcttaaagctctatacggctacgtcagggacttataccatgttaaatgggattggcgatgcaattttctactttatgccagttattttaggttatacagcagctaaaaaattccggttgcatccaatggtagggatcgtgattggcgcagctttatgttacccaacgattcaaggaagtgcattacaaacggcctttgaaacaacagcgggtgcgggagccgcagcgccgtataatttattcggcttacctgcctatgatacatttattgggattccttgggtcggtgcgaactatacaagtagtgtcgtaccaatcatcttcattattgcttttgcggcacaagttcaaaaagtgtttaaacgtattattccagaagttgttcaaacgttcttagtaccgtttttcgtcttgttgattgccttaccaattggtttcttagtaattgggccaatcgttagcatgctaacagatttattaagcgctggctttacagcattaatgagtttctcaccagctttgtatggtttgattcttggtttcttctggcaagtcttagttatttttggtttacattggagcgttgtgccattagctattatgcaagtgacacaagaaggttcaagccaagtattaacgggatcatttgcagctagttttgcgcaaacagcggttgttttagcgatgttcttcaaattgaaagataaaaagttaaaagctttgtgtccgccagcaattatctctggtatttttggtgtaacagagccagcaatttatggaatcactttaccaaaaaaatggccatttatttattcaatgattggtggcgctgtcggtggtttatatttgatgatcaacaatgtgacagcttatacaatgggtggtttaggaatttttggtgtgctaaactttatcaatggtgatgatgcaagtgggatgatccagtcctttattgcaattgccattgcagcggtcgttg

SEQ ID NO: 212 - protein, 455 aa, Enterococcus faecalis
MGKYHELAEKIVKNVGGQENINSLTHCITRLRFKLKDESQANDDVLKNMDGVVTVMKSGGQYQVVIGNHVPAVYEEVVSIAGLSGEREEEASSGNLFDRLIDILSGCFQPFLGALAAAGMVKGLNALLVFLKLYTATSGTYTMLNGIGDAIFYFMPVILGYTAAKKFRLHPMVGIVIGAALCYPTIQGSALQTAFETTAGAGAAAPYNLFGLPAYDTFIGIPWVGANYTSSVVPIIFIIAFAAQVQKVFKRIIPEVVQTFLVPFFVLLIALPIGFLVIGPIVSMLTDLLSAGFTALMSFSPALYGLILGFFWQVLVIFGLHWSVVPLAIMQVTQEGSSQVLTGSFAASFAQTAVVLAMFFKLKDKKLKALCPPAIISGIFGVTEPAIYGITLPKKWPFIYSMIGGAVGGLYLMINNVTAYTMGGLGIFGVLNFINGDDASGMIQSFIAIAIAAVV

SEQ ID NO: 213 - DNA, 1899 bp, Enterococcus faecalis
atgggaaaatatcatgaactagcagaaaaaattgtaaaaaatgtcggtgggcaagagaatattaatagtttgacacattgtatcacacgtcttcgctttaaattaaaagatgagagtcaagcgaatgatgatgtcttaaaaaatatggacggtgtggtaactgttatgaaaagcggtggacaataccaagtcgttattgggaaccatgttccagccgtttacgaagaagtagttagtattgcaggcttgtcaggagaacgtgaagaagaagcttccagtgggaatttatttgatcgcttaatagatattttaagtggttgtttccaaccctttttaggggcgttagcagcggctgggatggtcaaagggttaaatgccttattggttttcttaaagctctatacggctacgtcagggacttataccatgttaaatgggattggcgatgcaattttctactttatgccagttattttaggttatacagcagctaaaaaattccggttgcatccaatggtagggatcgtgattggcgcagctttatgttacccaacgattcaaggaagtgcattacaaacggcctttgaaacaacagcgggtgcgggagccgcagcgccgtataatttattcggcttacctgcctatgatacatttatggggattccttgggtcggtgcgaactatacaagtagtgtcgtaccaatcatcttcattattgcttttgcggcacaagttcaaaaagtgtttaaacgtattattccagaagttgttcaaacgttcttagtaccgtttttcgtcttgttgattgccttaccaattggtttcttagtaattgggccaatcgttagcatgctaacagatttattaagcgctggctttacagcattaatgagtttctcaccagctttgtatggtttgattcttggtttcttctggcaagtcttagttatttttgggttacattggagcgttgtgccattagctattatgcaagtgacacaagaaggttcaagccaagtattaacgggatcatttgcagctagttttgcgcaaacagcggttgttttagcgatgttcttcaaattgaaagataaaaagttaaaagctttgtgtccgccagcaattatctctggtatttttggtgtaacagagccagcaatttatggaatcactttaccaaaaaaatggccatttatttattcaatgattggtggcgctgtcggtggtttatatttgatgatcaacaatgtgacagcttatacaatgggtggtttaggaattttcggtgtgctaaactttatcaatggtgatgatgcaagtgggatgattcagtcctttattgcaattgccattgcagcggtcgttggttttggtctaacattcttcttctggaaagacaatacagttgaggaagaagaagtgattattgataaaacaacgattaaaaaagaaaatattacaagtccagtcaaaggacgagtgttatctttaaaaaatgcagaggatcctgcttttgcaaatggagcattaggaaatggggtcgtgattgaaccaacggaaggcaaagtggttgcaccctttgatggaacgattgtcacactattcccaacaaaacatgcattaggtttgatttcagataacggcacagaattattgattcatattgggattgatacagttcaattagaaggcgaaggctttgaagcttttgtaaaacaaggtgaccgcgtgaaaaaaggtcaaacattagtaacctttgatttagaaggaattaaaaaagctgggtttagtacacaaattccaatcgttgtgacgaatacagcggattatttagatattttggaagtcggcagtaatgaagtttcaacaagtgatgatttgctgaccgctttaatataa

SEQ ID NO: 214 - protein, 632 aa, Enterococcus faecalis; identical to SEQ ID NO: 184

SEQ ID NO: 215 - DNA, 1899 bp, Enterococcus faecalis
atgggaaaatatcatgaactagcagaaaaaattgtaaaaaatgtcggtgggcaagagaatattaatagtttgacacattgtatcacacgtcttcgcttcaaattaaaagatgagagtcaagcgaatgatgatgtcttaaaaaatatggacggtgtggtaactgttatgaaaagcggtggacaataccaagtcgttattgggaaccatgttccagccgtttatgaagaagtagttagtattgcaggcttgtcaggagaacgcgaagaagaagcttccagtgggaatttatttgatcgcttaatagatattttaagtggttgtttccaaccctttttaggggcgttagcagcggctgggatggtcaaagggttaaatgccttattggttttcttaaagctctatacggctacgtcagggacttataccatgttaaatgggattggcgatgcaattttctactttatgccagttattttaggttatacagcagctaaaaaattccggttgcatccaatggtagggatcgtgattggcgcagctttatgttacccaacgattcaaggaagtgcattacaaacggcctttgaaacaacagcgggtgccggagccgcagcaccgtataatttattcggcttacctgcctataatacatttatgggtattccttgggtcggtgcgaactatacaagtagtgtcgtaccaatcatcttcattattgcttttgcggcacaagttcaaaaagtgtttaaacggattattccagaagttgttcaaacgttcttagtaccgtttttcgtcttgttgattgccttaccaattggtttcttagtaattgggccaatcgttagcatgctaacagatttattaagcgctggctttacagcattaatgagtttctcaccagctttgtatggtttgattcttggtttcttctggcaagtcttagttatttttggtttacattggagcgttgtgccattagctattatgcaagtgacacaagaaggttcaagccaagtattaacgggatcatttgcagctagttttgcgcaaacagcggttgttttagcgatgttcttcaaattgaaagataaaaagttaaaagctttgtgtcctccagcaattatctctggtatttttggtgtaacagagccagcaatttatggaatcactttaccaaaaaaatggccatttatttattcaatgattggtggcgctgtcggtggtttatatttgatgatcaacaatgtgacagcttatacaatgggtggtttaggaattttcggtgtgctaaactttatcaatggtgatgatgcaagtgggatgattcagtcctttattgcaattgccattgcagcggtcgtcggttttggtctaacattcttcttctggaaagacaatacagttgaggaagaagaagtgattattgataaaacaacgattaaaaaagaaaatattacaagtccagtcaaaggacgagtgttatctttaaaaaatgcagaggatcctgcttttgcaaatggagctttaggaaatggggtcgtgattgaaccaacggaaggtaaagtggttgcaccctttgatggaacgattgtcacactattcccaacaaaacatgcattaggtttgatttcagataacggcacagaattattgattcatattgggattgatacagttcaattagaaggcgaaggctttgaagcttttgtaaaacaaggtgaccgcgtgaaaaaaggtcaaacattagtaacctttgatttagaaggaattaaaaaagctgggtttagtacacaaatcccaatcgttgtgacgaatacagcggattatttagatattttggaagtcggcagtaatgaagtttcaacaagtgatgatttgctgaccgctttaatataa

SEQ ID NO: 216 - protein, 632 aa, Enterococcus faecalis; identical to SEQ ID NO: 66

SEQ ID NO: 217 - DNA, 1896 bp, Enterococcus faecalis; identical to SEQ ID NO: 179

SEQ ID NO: 218 - protein, 631 aa, Enterococcus faecalis; identical to SEQ ID NO: 180

SEQ ID NO: 219 - DNA, 1899 bp, Enterococcus faecalis
atgggaaaatatcatgaactagcagaaaaaattgtaaaaaatgtcggtgggcaagagaatattaatagtttgacacattgtatcacacgtcttcgcttcaaattaaaagatgagagtcaagcgaatgatgatgtcttaaaaaatatggacggtgtggtaactgttatgaaaagcggtggacaataccaagtcgttattgggaaccatgttccagccgtttacgaagaagtagttagtattgcaggcttgtcaggagaacgtgaagaagaagcttccagtgggaatttatttgatcgcttaatagatattttaagtggttgtttccaaccctttttaggggcgttagcagcggctgggatggtcaaagggttaaatgccttattggttttcttaaagctctatacggctacgtcagggacttataccatgttaaatgggattggcgatgcaattttctactttatgccagttattttaggttatacagcagctaaaaaattccggttgcatccaatggtagggatcgtgattggcgcagctttatgttacccaacgattcaaggaagtgcattacaaacggcctttgaaacaacagcgggtgcgggagccgcagcgccgtataatttattcggcttacctgcctatgatacatttatggggattccttgggtcggtgcgaactatacaagtagtgtcgtaccaatcatcttcattattgcttttgcggcacaagttcaaaaagtgtttaaacgtattattccagaagttgttcaaacgttcttagtaccgtttttcgtcttgttgattgccttaccgattggtttcttagtaattgggccaatcgttagcatgctaacagatttattaagcgctggctttacagcattaatgagtttctcaccagctttgtatggtttgattcttggtttcttctggcaagtcttagttatttttggtttacattggagcgttgtgccattagctattatgcaagtgacacaagaaggttcaagccaagtattaacgggatcatttgcagctagttttgcgcaaacagcggttgttttagcgatgttcttcaaattgaaagataaaaagttaaaagctttgtgtccgccagcaattatctctggtatttttggtgtaacagagccagcaatttatggaatcactttaccaaaaaaatggccatttatttattcaatgattggtggcgctgtcggtggtttatatttgatgatcaacaatgtgacagcttatacaatgggtggtttaggaattttcggtgtgctaaactttatcaatggtgatgatgcaagtgggatgattcagtcctttattgcaattgccattgcagcggtcgttggttttggtctaacattcttcttctggaaagacaatacagttgaggaagaagaagtgattattgataaaacaacgattaaaaaagaaaatattacaagtccagtcaaaggacgagtgttatctttaaaaaatgcagaggatcctgcttttgcaaatggagcattaggaaatggggtcgtgattgaaccaacggaaggtaaagtggttgcaccctttgatggaacgattgtcacactattcccaacaaaacatgcattaggtttgatttcagataacggcacagaattattgattcatattgggattgatacagttcaattagaaggcgaaggctttgaagcttttgtaaaacaaggtgaccgcgtgaaaaaaggtcaaacattagtaacctttgatttagaaggaattaaaaaagctgggtttagtacacaaattccaatcgttgtgacgaatacagcggattatttagatattttggaagtcggcagtaatgaagtttcaacaagtgatgatttgctgaccgctttaatataa

SEQ ID NO: 220 - protein, 632 aa, Enterococcus faecalis; identical to SEQ ID NO: 184

SEQ ID NO: 221 - DNA, 1899 bp, Enterococcus faecalis; identical to SEQ ID NO: 191

SEQ ID NO: 222 - protein, 632 aa, Enterococcus faecalis; identical to SEQ ID NO: 192

SEQ ID NO: 223 - DNA, 1896 bp, Enterococcus faecalis; identical to SEQ ID NO: 179

SEQ ID NO: 224 - protein, 631 aa, Enterococcus faecalis; identical to SEQ ID NO: 180

SEQ ID NO: 225 - DNA, 1899 bp, Enterococcus faecalis
atgggaaaatatcatgaactagcagaaaaaattgtaaaaaatgtcggtgggcaagagaatattaatagtttgacacattgtatcacacgtcttcgcttcaaattaaaagatgagagtcaagcgaatgatgatgtcttaaaaaatatggacggtgtggtaactgttatgaaaagcggtggacaataccaagtcgttattgggaaccatgttccagccgtttacgaagaagtagttagtattgcaggcttgtcaggagaacgtgaagaagaagcttccagtgggaatttatttgatcgcttaatagatattttaagtggttgtttccaaccctttttaggggcgttagcagcggctgggatggtcaaagggttaaatgccttattggttttcttaaagctctatacggctacgtcagggacttataccatgttaaatgggattggcgatgcaattttctactttatgccagttattttaggttatacagcagctaagaaattccggttgcatccaatggtagggatcgtgattggcgcagctttatgttacccaacgattcaaggaagtgcattacaaacggtctttgaaacaacagcgggtgccggagccgcagcaccatataatttattcggtttacctgcctataatacatttatggggatcccttgggtcggtgcgaactatacaagtagtgtcgtaccaatcatcttcattattgcttttgcggcacaagttcaaaaagtgtttaaacgtattattccagaagttgttcaaacgttcttagtaccgtttttcgtcttgttgattgccttaccaattggtttcttagtaattgggccaatcgttagcatgctaacagatttattaagcgctggctttacagcattaatgagtttctcaccagctttgtatggtttgattcttggtttcttctggcaagtcttagttatttttggtttacattggagcgttgtgccattagctattatgcaagtgacacaagaaggttcaagccaagtattaacgggatcatttgcagctagttttgcgcaaacagcggttgttttagcgatgttcttcaaattgaaagataaaaagttaaaagctttgtgtccgccagcaattatctctggtatttttggtgtaacagagccagcaatttatggaatcactttaccaaaaaaatggccatttatttattcaatgattggtggcgctgtcggtggtttatatttgatgatcaacaatgtgacagcttatacaatgggtggtttaggaattttcggtgtgctaaactttatcaatggtgatgatgcaagtgggatgattcagtcctttattgcaattgccattgcagcggtcgttggttttggtctaacattcttcttctggaaagacgatacagttgaggaagaagaagtgattattgataaaacaacgattaaaaaagaaaatattacaagtccagtcaaaggacgagtgttatctttaaaaaatgcagaggatcctgcttttgcaaatggagctttaggaaatggggtcgtgattgaaccaacggaaggtaaagtggttgcaccctttgatggaacgattgtcacactattcccaacaaaacatgcattaggtttgatttcagataacggcacagaattattgattcatattgggattgatacagttcaattagaaggcgaaggctttgaagcttttgtaaaacaaggtgaccgcgtgaaaaaaggtcaaacattagtaacctttgatttagaaggaattaaaaaagctgggtttagtacacaaattccaatcgttgtgacgaatacagcggattatttagatattttggaagtcggcagtaatgaagtttcaacaagtgatgatttgctgaccgctttaatataa

SEQ ID NO: 226 - protein, 632 aa, Enterococcus faecalis
MGKYHELAEKIVKNVGGQENINSLTHCITRLRFKLKDESQANDDVLKNMDGVVTVMKSGGQYQVVIGNHVPAVYEEVVSIAGLSGEREEEASSGNLFDRLIDILSGCFQPFLGALAAAGMVKGLNALLVFLKLYTATSGTYTMLNGIGDAIFYFMPVILGYTAAKKFRLHPMVGIVIGAALCYPTIQGSALQTVFETTAGAGAAAPYNLFGLPAYNTFMGIPWVGANYTSSVVPIIFIIAFAAQVQKVFKRIIPEVVQTFLVPFFVLLIALPIGFLVIGPIVSMLTDLLSAGFTALMSFSPALYGLILGFFWQVLVIFGLHWSVVPLAIMQVTQEGSSQVLTGSFAASFAQTAVVLAMFFKLKDKKLKALCPPAIISGIFGVTEPAIYGITLPKKWPFIYSMIGGAVGGLYLMINNVTAYTMGGLGIFGVLNFINGDDASGMIQSFIAIAIAAVVGFGLTFFFWKDDTVEEEEVIIDKTTIKKENITSPVKGRVLSLKNAEDPAFANGALGNGVVIEPTEGKVVAPFDGTIVTLFPTKHALGLISDNGTELLIHIGIDTVQLEGEGFEAFVKQGDRVKKGQTLVTFDLEGIKKAGFSTQIPIVVTNTADYLDILEVGSNEVSTSDDLLTALI

SEQ ID NO: 227 - DNA, 1896 bp, Enterococcus faecalis
atgggaaaatatcatgaactagcagaaaaaattgtaaaaaatgtcggtgggcaagagaatattaatagtttgacacattgtatcacacgtcttcgcttcaaattaaaagatgagagtcaagcgaatgatgatgtcttaaaaaatatggacggtgtggtaactgttatgaaaagcggtggacaataccaagtcgttattgggaaccatgttccagccgtttacgaagaagtagttagtattgcaggcttgtcaggagaacgtgaagaagaagcttccagtgggaatttatttgatcgcttaatagatattttaagtggttgtttccaaccctttttaggggcgttagcagcggctgggatggtcaaagggttaaatgccttattggctttcttaaagctctatacggctacgtcagggacttataccatgttaaatgggattggcgatgcaattttctactttatgccagttattttaggttatacagcagctaaaaaattccggttgcatccaatggtagggatcgtgattggcgcagctttatgttacccaacgattcaaggaagtgcattacaaacggcctttgaaacaacagcgggtgcgggagccgcagcgccgtataatttattcggcttacctgcctatgatacatttattgggattccttgggtcggtgcgaactatacaagtagtgtcgtaccaatcatcttcattattgcttttgcggcacaagttcaaaaagtgtttaaacgtattattccagaagttgttcaaacgttcttagtaccgtttttcgtcttgttgattgccttaccaattggtttcttagtaattgggccaatcgttagcatgctaacagatttattaagcgctggctttacagcattaatgagtttctcaccagctttgtatggtttgattcttggtttcttctggcaagtcttagttatttttggtttacattggagcgttgtgccattagctattatgcaagtgacacaagaaggttcaagccaagtattaacgggatcatttgcagctagttttgcgcaaacagcggttgttttagcgatgttcttcaaattgaaagataaaaagttaaaagctttgtgtccgccagcaattatctctggtatttttggtgtaacagagccagcaatttatggaatcactttaccaaaaaaatggccatttatttattcaatgattggtggcgctgtcggtggtttatatttgatgatcaacaatgtgacagcttatacaatgggtggtttaggaatttttggtgtgctaaactttatcaatggtgatgatgcaagtgggatgatccagtcctttattgcaattgccattgcagcggtcgttggttttggtctaacattcttcttctggaaagacaatacagttgaggaagaagtgattattgataaaacaacgattaaaaaagaaaatattacaagtccagtcaaaggacgagtgttatctttaaaaaatgcagaggatcctgcttttgcaaatggagcattaggaaatggggtcgtgattgaaccaacggaaggtaaagtggttgcaccctttgatggaacgattgtcacactattcccaacaaaacatgcattaggtttgatttcagataacggcacagaattattgattcatattgggattgatacagttcaattagaaggcgaaggctttgaagcttttgtaaaacaaggtgaccgcgtgaaaaaaggtcaaacattagtaacctttgatttagaaggaattaaaaaagctgggtttagtacacaaattccaatcgttgtgacgaatacagcggattatttagatattttggaagtcggcagtaatgaagtttcaacaagtgatgatttgctgaccgctttaatataa

SEQ ID NO: 228 - protein, 631 aa, Enterococcus faecalis
MGKYHELAEKIVKNVGGQENINSLTHCITRLRFKLKDESQANDDVLKNMDGVVTVMKSGGQYQVVIGNHVPAVYEEVVSIAGLSGEREEEASSGNLFDRLIDILSGCFQPFLGALAAAGMVKGLNALLAFLKLYTATSGTYTMLNGIGDAIFYFMPVILGYTAAKKFRLHPMVGIVIGAALCYPTIQGSALQTAFETTAGAGAAAPYNLFGLPAYDTFIGIPWVGANYTSSVVPIIFIIAFAAQVQKVFKRIIPEVVQTFLVPFFVLLIALPIGFLVIGPIVSMLTDLLSAGFTALMSFSPALYGLILGFFWQVLVIFGLHWSVVPLAIMQVTQEGSSQVLTGSFAASFAQTAVVLAMFFKLKDKKLKALCPPAIISGIFGVTEPAIYGITLPKKWPFIYSMIGGAVGGLYLMINNVTAYTMGGLGIFGVLNFINGDDASGMIQSFIAIAIAAVVGFGLTFFFWKDNTVEEEVIIDKTTIKKENITSPVKGRVLSLKNAEDPAFANGALGNGVVIEPTEGKVVAPFDGTIVTLFPTKHALGLISDNGTELLIHIGIDTVQLEGEGFEAFVKQGDRVKKGQTLVTFDLEGIKKAGFSTQIPIVVTNTADYLDILEVGSNEVSTSDDLLTALI

SEQ ID NO: 229 - DNA, 1899 bp, Enterococcus faecalis
atgggaaaatatcatgaactagcagaaaaaattgtaaaaaatgtcggtgggcaagagaatattaatagtttgacacattgtatcacacgtcttcgcttcaaattaaaagatgagagtcaagcgaatgatgatgtcttaaaaaatatggacggtgtggtaactgttatgaaaagcggtggacaataccaagtcgttattgggaaccatgttccagccgtttacgaagaagtagttagtattgcaggcttgtcaggagaacgtgaagaagaagcttccagtgggaatttatttgatcgcttaatagatattttaagtggttgtttccaaccctttttaggggcgttagcagcggctgggatggtcaaagggttaaatgccttattggttttcttaaagctctatacggctacgtcagggacttataccatgttaaatgggattggcgatgcaattttctactttatgccagttattttaggttatacagcagctaaaaaattccggttgcatccaatggtagggatcgtgattggcgcagctttatgttacccaacgattcaaggaagtgcattacaaacggcctttgaaacaacagcgggtgccggagccgcagcaccgtataatttattcggtttacctgcctataatacatttatggggattccttgggtcggtgcgaactatacaagtagtgtcgtaccaatcatcttcattattgcttttgcggcacaagttcaaaaagtgtttaaacgtattattccagaagttgttcaaacgttcttagtaccgtttttcgtcttgttgattgccttaccaattggtttcttagtaattgggccaatcgttagcatgctaacagatttattaagcgctggctttacagcattaatgagtttctcaccagctttgtatggtttgattcttggtttcttctggcaagtcttagttgtttttggtttacattggagcgttgtgccattagctattatgcaagtgacacaagaaggttcaagccaagtattaacgggatcatttgcagctagttttgcgcaaacagcggttgttttagcgatgttcttcaaattgaaagataaaaagttaaaagctttgtgtccgccagcaattatctctggtatttttggtgtaacagagccagcaatttatggaatcactttaccaaaaaaatggccatttatttattcaatgattggtggcgctgtcggtggtttatatttgatgatcaacaatgtgacagcttatacaatgggtggtttaggaatttttggtgtgctaaactttatcaatggtgatgatgcaagtgggatgatccagtcctttattgcaattgccattgcagcggtcgttggttttggtctaacattcttcttctggaaagacaatacagttgaggaagaagaagtgattattgataaaacaacgattaaaaaagaaaatattacaagtccagtcaaaggacgagtgttatctttaaaaaatgcagaggatcctgcttttgcaaatggagcattaggaaatggggtcgtgattgaaccaacggaaggtaaagtggttgcaccctttgatggaacgattgtcacactattcccaacaaaacatgcattaggtttgatttcagataacggcacagaattattgattcatattgggattgatacagttcaattagaaggcgaaggctttgaagcttttgtaaaacaaggtgaccgcgtgaaaaaaggtcaaacattagtaacctttgatttagaaggaattaaaaaagctgggtttagtacacaaattccaatcgttgtgacgaatacagcggattatttagatattttggaagtcggcagtaatgaagtttcaacaagtgatgatttgctgaccgctttaatataa

SEQ ID NO: 230 - protein, 632 aa, Enterococcus faecalis
MGKYHELAEKIVKNVGGQENINSLTHCITRLRFKLKDESQANDDVLKNMDGVVTVMKSGGQYQVVIGNHVPAVYEEVVSIAGLSGEREEEASSGNLFDRLIDILSGCFQPFLGALAAAGMVKGLNALLVFLKLYTATSGTYTMLNGIGDAIFYFMPVILGYTAAKKFRLHPMVGIVIGAALCYPTIQGSALQTAFETTAGAGAAAPYNLFGLPAYNTFMGIPWVGANYTSSVVPIIFIIAFAAQVQKVFKRIIPEVVQTFLVPFFVLLIALPIGFLVIGPIVSMLTDLLSAGFTALMSFSPALYGLILGFFWQVLVVFGLHWSVVPLAIMQVTQEGSSQVLTGSFAASFAQTAVVLAMFFKLKDKKLKALCPPAIISGIFGVTEPAIYGITLPKKWPFIYSMIGGAVGGLYLMINNVTAYTMGGLGIFGVLNFINGDDASGMIQSFIAIAIAAVVGFGLTFFFWKDNTVEEEEVIIDKTTIKKENITSPVKGRVLSLKNAEDPAFANGALGNGVVIEPTEGKVVAPFDGTIVTLFPTKHALGLISDNGTELLIHIGIDTVQLEGEGFEAFVKQGDRVKKGQTLVTFDLEGIKKAGFSTQIPIVVTNTADYLDILEVGSNEVSTSDDLLTALI

SEQ ID NO: 231 - DNA, 1899 bp, Enterococcus faecalis
atgggaaaatatcatgaactagcagaaaaaattgtaaaaaatgtcggtgggcaagagaatattaatagtttgacacattgtatcacacgtcttcgcttcaaattaaaagatgagagtcaagcgaatgatgatgtcttaaaaaatatggacggtgtggtaactgttatgaaaagcggtggacaataccaagtcgttattgggaaccatgttccagccgtttacgaagaagtagttagtattgcaggcttgtcaggagaacgtgaagaagaagcttccagtgggaatttatttgatcgcttaatagatattttaagtggttgtttccaaccctttttaggggcgttagcagcggctgggatggtcaaagggttaaatgccttattggttttcttaaagctctatacggctacgtcagggacttataccatgttaaatgggattggcgatgcaattttctactttatgccagttattttaggttatacagcagctaaaaaattccggttgcatccaatggtagggatcgtgattggcgcagctttatgttacccaacgattcaaggaagtgcattacaaacggcctttgaaacaacagcgggtgcgggagccgcagcgccgtataatttattcggcttacctgcctatgatacatttatggggattccttgggtcggtgcgaactatacaagtagtgtcgtaccaatcatcttcattattgcttttgcggcacaagttcaaaaagtgtttaaacgtattattccagaagttgttcaaacgttcttagtaccgtttttcgtcttgttgattgccttaccaattggtttcttagtaattgggccaatcgttagcatgctaacagatttattaagcgctggctttacagcattaatgagtttctcaccagctttgtatggtttgattcttggtttcttctggcaagtcttagttatttttggtttacattggagcgttgtgccattagctattatgcaagtgacacaagaaggttcaagccaagtattaacgggatcatttgcagctagttttgcgcaaacagcggttgttttagcgatgttcttcaaattgaaagataaaaagttaaaagctttgtgtccgccagcaattatctctggtatttttggtgtaacagagccagcaatttatggaatcactttaccaaaaaaatggccatttatttattcaatgattggtggcgctgtcggtggtttatatttgatgatcaacaatgtgacagcttatacaatgggtggtttaggaattttcggtgtgctaaactttatcaatggtgatgatgcaagtgggatgattcagtcctttattgcaattgccattgcagcggtcgttggttttggtctaacattcttcttctggaaagacaatacagttgaggaagaagaagtgattattgataaaacaacgattaaaaaagaaaatattacaagtccagtcaaaggacgagtgttatctttaaaaaatgcagaggatcctgcttttgcaaatggagcattaggaaatggggtcgtgattgaaccaacggaaggtaaagtggttgcaccctttgatggaacgattgtcacactattcccaacaaaacatgcattaggtttgatttcagataacggcacagaattattgattcatattgggattgatacagttcaattagaaggcgaaggctttgaagcttttgtaaaacaaggtgaccgcgtgaaaaaaggtcaaacattagtaacctttgatttagaaggaattaaaaaagctgggtttagtacacaaattccaatcgttgtgacgaatacagcggattatttagatattttggaagtcggcagtaatgaagtttcaacaagtgatgatttgctgaccgctttaatataa

SEQ ID NO: 232 - protein, 632 aa, Enterococcus faecalis; identical to SEQ ID NO: 184

SEQ ID NO: 233 - DNA, 1899 bp, Enterococcus faecalis; identical to SEQ ID NO: 191

SEQ ID NO: 234 - protein, 632 aa, Enterococcus faecalis; identical to SEQ ID NO: 192

SEQ ID NO: 235 - DNA, 1896 bp, Enterococcus faecalis; identical to SEQ ID NO: 207

SEQ ID NO: 236 - protein, 631 aa, Enterococcus faecalis; identical to SEQ ID NO: 198

SEQ ID NO: 237 - DNA, 1899 bp, Enterococcus faecalis; identical to SEQ ID NO: 185

SEQ ID NO: 238 - protein, 632 aa, Enterococcus faecalis; identical to SEQ ID NO: 184

SEQ ID NO: 239 - DNA, 1899 bp, Enterococcus faecalis
atgggaaaatatcatgaactagcagaaaaaattgtaaaaaatgtcggtgggcaagagaatattaatagtttgacacattgtatcacacgtcttcgctttaaattaaaagatgagagtcaagcgaatgatgatgtcttaaaaaatatggacggtgtggtaactgttatgaaaagcggtggacaataccaagtcgttattgggaaccatgttccagccgtttacgaagaagtagttagtattgcaggcttgtcaggagaacgtgaagaagaagcttccagtgggaatttatttgatcgcttaatagatattttaagtggttgtttccaaccctttttaggggcgttagcagcggctgggatggtcaaagggttaaatgccttattggttttcttaaagctctatacggctacgtcagggacttataccatgttaaatgggattggcgatgcaattttctactttatgccagttattttaggttatacagcagctaaaaaattccggttgcatccaatggtagggatcgtgattggcgcagctttatgttacccaacgattcaaggaagtgcattacaaacggcctttgaaacaacagcgggtgcgggagccgcagcgccgtataatttattcggcttacctgcctatgatacatttatggggattccttgggtcggtgcgaactatacaagtagtgtcgtaccaatcatcttcattattgcttttgcggcacaagttcaaaaagtgtttaaacgtattattccagaagttgttcaaacgttcttagtaccgtttttcgtcttgttgattgccttaccaattggtttcttagtaattgggccaatcgttagcatgctaacagatttattaagcgctggctttacagcattaatgagtttctcaccagctttgtatggtttgattcttggtttcttctggcaagtcttagttatttttggtttacattggagcgttgtgccattagctattatgcaagtgacacaagaaggttcaagccaagtattaacgggatcatttgcagctagttttgcgcaaacagcggttgttttagcgatgttcttcaaattgaaagataaaaagttaaaagctttgtgtccgccagcaattatctctggtatttttggtgtaacagagccagcaatttatggaatcactttaccaaaaaaatggccatttatttattcaatgattggtggcgctgtcggtggtttatatttgatgatcaacaatgtgacagcttatacaatgggtggtttaggaatttttggtgtgctaaactttatcaatggtgatgatgcaagtgggatgatccagtcctttattgcaattgccattgcagcggtcgttggttttggtctaacattcttcttctggaaagacaatacagttgaggaagaagaagtgattattgataaaacaacgattaaaaaagaaaatattacaagtccagtcaaaggacgagtgttatctttaaaaaatgcagaggatcctgcttttgcaaatggagctttaggaaatggagtcgtgattgaaccaacggaaggtaaagtggttgcaccctttgatggaacgattgtcacactattcccaacaaaacatgcattaggtttgatttcagataacggcacagaattattgattcatattgggattgatacagttcaattagaaggcgaaggctttgaagcttttgtaaaacaaggtgaccgcgtgaaaaaaggtcaaacattagtaacctttgatttagaaggaattaaaaaagctgggtttagtacacaaattccaatcgttgtgacgaatacagcggattatttagatattttggaagtcggcagtaatgaagtttcaacaagtgatgatttgctgaccgctttaatataa

SEQ ID NO: 240 - protein, 632 aa, Enterococcus faecalis; identical to SEQ ID NO: 184

SEQ ID NO: 241 - DNA, 1899 bp, Enterococcus faecalis
atgggaaaatatcatgaactagcagaaaaaattgtaaaaaatgtcggtgggcaagagaatattaatagtttgacacattgtatcacacgtcttcgcttcaaattaaaagatgagagtcaagcgaatgatgatgtcttaaaaaatatggacggtgtggtaactgttatgaaaagcggtggacaataccaagtcgttattgggaaccatgttccagccgtttatgaagaagtagttagtattgcaggcttgtcaggagaacgtgaagaagaagcttccagcgggaatttatttgatcgcttaatagatattttaagtggttgtttccaaccctttttaggggcgttagcagcggctgggatggttaaagggttaaatgccttattggttttcttaaagctctatacggctacgtcagggacttataccatgttaaatgggattggcgatgcaattttctactttatgccagttattttaggttatacagcagctaaaaaattccggttgcatccaatggtagggatcgtgattggtgcagctttatgttacccaacgattcaaggaagtgcattacaaacggcctttgaaacaacagcgggtgcgggagccgcagcaccgtataatttattcggtttacctgcctataatacatttatggggattccttgggtcggtgcgaactatacaagtagtgtcgtaccaatcatcttcattattgcttttgcggcacaagttcaaaaagtgtttaaacggattattccagaagttgttcaaacgttcttagtaccgtttttcgtcttgttgattgccttaccaattggtttcttagtaattgggccaatcgttagcatgctaacagatttattaagcgctggctttacagcattaatgagtttctcaccagctttgtatggtttgattcttggtttcttctggcaagtcttagttatttttggtttacattggagcgttgtgccattagctattatgcaagtgacacaagaaggctcaagccaagtattaacgggatcatttgcagctagttttgcgcaaacagcggttgttttagcgatgttcttcaaattgaaagataaaaagttaaaagctttgtgtccgccagcaattatctctggtatttttggtgtaacagagccagcgatttatggaatcactttaccgaaaaaatggccatttatttattcaatgattggtggcgctgtcggtggtttatatttgatgatcaacaatgtgacagcttatacaatgggtggtttaggaattttcggtgtgctaaactttatcaatggtgatgatgcaagtgggatgattcagtcctttattgcaattgccattgcagcggtcgttggttttggtctaacattcttcttctggaaagacaatacagttgaggaagaagaagtgattattgataaaacaacgattaaaaaagaaaatattacaagtccagtcaaaggacgagtgttatctttaaaaaatgcagaggatcctgcttttgcaaatggagcattaggaaatggggtcgtgattgaaccaacggaaggcaaagtggttgcaccctttgatggaacgattgtcacactattcccaacaaaacacgcattaggtttgatttcagataacggcacagaattattgattcatattgggattgatacagttcaattagaaggcgaaggctttgaagcttttgtaaaacaaggtgaccgcgtgaaaaaaggtcaaacattagtaacctttgatttagaaggaattaaaaaagctgggtttagtacacaaattccaatcgttgtgacgaatacagcggattatttagatattttggaagtcggcagtaatgaagtttcaacaagcgatgatttgctgaccgctttaatataa

SEQ ID NO: 242 - protein, 632 aa, Enterococcus faecalis; identical to SEQ ID NO: 66

SEQ ID NO: 243 - DNA, 1899 bp, Enterococcus faecalis; identical to SEQ ID NO: 205

SEQ ID NO: 244 - protein, 632 aa, Enterococcus faecalis; identical to SEQ ID NO: 66

SEQ ID NO: 245 - DNA, 1899 bp, Enterococcus faecalis
atgggaaaatatcatgaactagcagaaaaaattgtaaaaaatgtcggtgggcaagagaatattaatagtttgacacattgtatcacacgtcttcgcttcaaattaaaagatgagagtcaagcgaatgatgatgtcttaaaaaatatggacggtgtggtaactgttatgaaaagcggtggacaataccaagtcgttattgggaaccatgttccagccgtttacgaagaagtagttagtattgcaggcttgtcaggagaacgtgaagaagaagcttccagtggaaatttatttgatcgcttaatagatattttaagtggttgtttccaaccctttttaggggcgttagcagcggctgggatggttaaagggttaaatgccttattggttttcttaaagctctatacggctacgtcagggacttataccatgttaaatgggattggcgatgcaattttctactttatgccagttattttaggttatacagcagctaaaaaattccggttgcatccaatggtagggatcgtgattggtgcagctttatgttacccaacgattcaaggaagtgcattacaaacggcctttgaaacaacagcgggtgcgggagccgcagcaccgtataatttattcggtttacctgcctataatacatttatggggattccttgggtcggtgcgaactatacaagtagtgtcgtaccaatcatcttcattattgcttttgcggcacaagttcaaaaagtgtttaaacgtattattccagaagttgttcaaacgttcttagtaccgtttttcgtcttgttgattgccttaccaattggtttcttagtaattgggccaatcgttagcatgctaacagatttattaagcgctggctttacagcattaatgagtttctcaccagctttgtatggtttgattcttggtttcttctggcaagtcttagttatttttggtttacattggagcgttgtgccattagctattatgcaagtgacacaagaaggttcaagccaagtattaacgggatcatttgcagctagttttgcgcaaacagcggttgttttagcgatgttcttcaaattgaaagataaaaagttaaaagctttgtgtccgccagcaattatctctggtatttttggtgtaacagagccagcaatttatggaatcactttaccaaaaaaatggccatttatttattcaatgattggtggcgctgtcggtggtttatatttgatgatcaacaatgtgacagcttatacaatgggtggtttaggaattttcggtgtgctaaactttatcaatggtgatgatgcaagtgggatgatccagtcctttattgcaattgccattgcagcggtcgttggttttggtctaacattcttcttctggaaagacaatacagttgaggaagaagaagtgattattgataaaacaacgattaaaaaagaaaatattacaagtccagtcaaaggacgagtgttatctttaaaaaatgcagaggatcctgcttttgcaaatggagcattaggaaatggggtcgtgattgaaccaacggaaggtaaagtggttgcaccctttgatggaacgattgtcacactattcccaacaaaacatgcattaggtttgatttcagataacggcacagaattattgattcatattgggattgatacagttcaattagaaggcgaaggctttgaagcttttgtaaaacaaggtgaccgcgtgaaaaaaggtcaaacattagtaacctttgatttagaaggaattaaaaaagctgggtttagtacacaaattccaatcgttgtgacgaatacagcggattatttagatattttggaagtcggcagtaatgaagtttcaacaagtgatgatttgctgaccgctttaatataa

SEQ ID NO: 246 - protein, 632 aa, Enterococcus faecalis; identical to SEQ ID NO: 66

SEQ ID NO: 247 - DNA, 1899 bp, Enterococcus faecalis; identical to SEQ ID NO: 205

SEQ ID NO: 248 - protein, 632 aa, Enterococcus faecalis; identical to SEQ ID NO: 66

SEQ ID NO: 249 - DNA, 1896 bp, Enterococcus faecalis; identical to SEQ ID NO: 179

SEQ ID NO: 250 - protein, 631 aa, Enterococcus faecalis; identical to SEQ ID NO: 180

SEQ ID NO: 251 - DNA, 1896 bp, Enterococcus faecalis; identical to SEQ ID NO: 207

SEQ ID NO: 252 - protein, 631 aa, Enterococcus faecalis; identical to SEQ ID NO: 198

SEQ ID NO: 253 - DNA, 1899 bp, Enterococcus faecalis
atgggaaaatatcatgaactagcagaaaaaattgtaaaaaatgtcggtgggcaagagaatattaatagtttgacacattgtatcacacgtcttcgcttcaaattaaaagatgagagtcaagcgaatgatgatgtcttaaaaaatatggacggtgtggtaactgttatgaaaagcggcggacaataccaagtcgttattgggaaccatgttccagccgtttacgaagaagtagttagtattgcaggcttgtcaggagaacgtgaagaagaagcttccagtgggaatttatttgatcgcttaatagatattttaagtggttgtttccaaccctttttaggggcgttagcagcggctgggatggtcaaagggttaaatgccttattggttttcttaaagctctatacggctacgtcagggacttataccatgctaaatgggattggcgatgcaattttctactttatgccagttattttaggttatacagcagctaaaaaattccggttgcatccaatggtagggatcgtgattggcgcagctttatgttacccaacgattcaaggaagtgcattacaaacggcctttgaaacaacagcgggtgcgggagccgcagcaccgtataatttattcggtttacctgcctataatacctttatggggatcccttgggtcggtgcgaactatacaagtagtgtcgtaccaatcatcttcattattgcttttgcggcacaagttcaaaaagtgtttaaacggattattccagaagttgttcaaacgttcttagtaccgtttttcgtcttgttgattgccttaccaattggtttcttagtaattgggccaatcgttagcatgctaacagatttattaagcgctggctttacagcattaatgagtttctcaccagctttgtatggtttgattcttggcttcttctggcaagtcttagttatttttggtttacattggagcgttgtgccattagccattatgcaagtgacacaagaaggttcaagccaagtattaacgggatcatttgcagctagttttgcgcaaacagcggttgttttagcgatgttcttcaaattgaaagataaaaagttaaaagctttgtgtccgccagcaattatctctggtatttttggtgtaacagagccagcaatttatggaatcactttaccaaaaaaatggccatttatttattcaatgattggtggcgctgtcggtggtttatatttgatgatcaacaatgtgacagcttatacaatgggtggtttaggaattttcggtgtgctaaactttatcaatggtgatgatgcaagtgggatgatccagtcctttattgcaattgccattgcagcggtcgttggttttggtctaacattcttcttctggaaagacaatacagttgaggaagaagaagtgattattgataaaacaacgattaaaaaagaaaatattacaagtccagtcaaaggacgagtgttatctttaaaaaatgcagaggatcctgcttttgcaaatggagcattaggaaatggggtcgtgattgaaccaacggaaggtaaagtggttgcaccctttgatggaacgattgtcacactattcccaacaaaacatgcattaggtttgatttcagataacggcacagaattattgattcatattgggattgatacagttcaattagaaggcgaaggctttgaagcttttgtaaaacaaggtgaccgcgtgaaaaaaggtcaaacattagtaacctttgatttagaaggaattaaaaaagctgggtttagtacacaaattccaatcgttgtgacgaatacagcggattatttagatattttggaagtcggcagtaatgaagtttcaacaagtgatgatttgctgaccgctttaatataa

SEQ ID NO: 254 - protein, 632 aa, Enterococcus faecalis; identical to SEQ ID NO: 66

SEQ ID NO: 255 - DNA, 1899 bp, Enterococcus faecalis; identical to SEQ ID NO: 219

SEQ ID NO: 256 - protein, 632 aa, Enterococcus faecalis; identical to SEQ ID NO: 184

SEQ ID NO: 257 - DNA, 1896 bp, Enterococcus faecalis; identical to SEQ ID NO: 207

SEQ ID NO: 258 - protein, 631 aa, Enterococcus faecalis; identical to SEQ ID NO: 198

SEQ ID NO: 259 - DNA, 1896 bp, Enterococcus faecalis; identical to SEQ ID NO: 207

SEQ ID NO: 260 - protein, 631 aa, Enterococcus faecalis; identical to SEQ ID NO: 198

SEQ ID NO: 261 - DNA, 1899 bp, Enterococcus faecalis
atgggaaaatatcatgaactagcagaaaaaattgtaaaaaatgtcggtgggcaagagaatattaatagtttgacacattgtatcacacgtcttcgcttcaaattaaaagatgagagtcaagcgaatgatactgtcttaaaaaacatggacggtgtggtaactgttatgaaaagcggtggacaataccaagtcgttattgggaaccatgttccagccgtttacgaagaagtagttagtattgcaggcttgtcaggagaacgtgaagaagaagcttccagtgggaatttatttgatcgcttaatagatattttaagtggttgtttccaaccctttttaggggcgttagcagcggctgggatggtcaaagggttaaatgccttattggttttcttaaagctctatacggctacgtcagggacttatatcatgttaaatgggattggcgatgcaattttctactttatgccagttattttaggttatacagcagctaaaaaattccggttgcatccaatggtagggatcgtgattggcgcagctttatgttacccaacgattcaaggaagtgccttacaaacggcctttgaaacaacagcgggtgcgggagccgcagcaccgtataatttattcggcttacctgcctataatacatttatggggatcccttgggtcggtgcgaactatacaagtagtgtcgtaccaatcatcttcattattgcttttgcggcacaagttcaaaaagtgtttaaacgtattattccagaagttgttcaaacgttcttagtaccgtttttcgtcttgttgattgccttaccaattggtttcttagtaattgggccaatcgttagcatgctaacagatttattaagcgctggctttacagcattaatgagtttctcgccagctttgtatggtttgattcttggtttcttctggcaagtcttggttatttttggtttacattggagcgttgtgccattagctattatgcaagtgacacaagaaggctcaagccaagtattaacgggatcatttgcagctagttttgcgcaaacagcggttgttttagcgatgttcttcaaattgaaagataaaaagttaaaagctttgtgtccgccagcaattatctctggtatttttggtgtaacagagccagcgatttatggaatcactttaccgaaaaaatggccatttatttattcaatgattggtggcgctgtcggtggtttatatttgatgatcaacaatgtgacagcttatacaatgggtggtttaggaattttcggtgtgctaaactttatcaatggtgatgatgcaagtgggatgattcagtcctttattgcaattgccattgcagcggtcgttggttttggtttaacattcttcttctggaaagacaatacggttgaggaagaagaagtgattattgataaaacaacgattaaaaaagaaaatattacaagtccagtcaaaggacgagtgttatctttaaaaaatgcagaggatcctgcttttgcaaatggagcattaggaaatggggtcgtgattgaaccaacggaaggcaaagtggttgcaccctttgatggaacgattgtcacactattcccaacaaaacatgcattaggtttgatttcagataacggcacagagttattgattcatattgggattgatacagttcaattagaaggcgaaggctttgaagcttttgtaaaacaaggtgaccgcgtgaaaaaaggtcaaacattagtaacctttgatttagaaggaattaaaaaagctgggtttagtacacaaattccaatcgttgtgacgaatacagcggattatttagatattttggaagtcggcagtaatgaagtttcaacaagcgatgatttgctgaccgctttaatataa

SEQ ID NO: 262 - protein, 632 aa, Enterococcus faecalis
MGKYHELAEKIVKNVGGQENINSLTHCITRLRFKLKDESQANDTVLKNMDGVVTVMKSGGQYQVVIGNHVPAVYEEVVSIAGLSGEREEEASSGNLFDRLIDILSGCFQPFLGALAAAGMVKGLNALLVFLKLYTATSGTYIMLNGIGDAIFYFMPVILGYTAAKKFRLHPMVGIVIGAALCYPTIQGSALQTAFETTAGAGAAAPYNLFGLPAYNTFMGIPWVGANYTSSVVPIIFIIAFAAQVQKVFKRIIPEVVQTFLVPFFVLLIALPIGFLVIGPIVSMLTDLLSAGFTALMSFSPALYGLILGFFWQVLVIFGLHWSVVPLAIMQVTQEGSSQVLTGSFAASFAQTAVVLAMFFKLKDKKLKALCPPAIISGIFGVTEPAIYGITLPKKWPFIYSMIGGAVGGLYLMINNVTAYTMGGLGIFGVLNFINGDDASGMIQSFIAIAIAAVVGFGLTFFFWKDNTVEEEEVIIDKTTIKKENITSPVKGRVLSLKNAEDPAFANGALGNGVVIEPTEGKVVAPFDGTIVTLFPTKHALGLISDNGTELLIHIGIDTVQLEGEGFEAFVKQGDRVKKGQTLVTFDLEGIKKAGFSTQIPIVVTNTADYLDILEVGSNEVSTSDDLLTALI

SEQ ID NO: 263 - DNA, 1899 bp, Enterococcus faecalis
atgggaaaatatcatgaactagcagaaaaaattgtaaaaaatgtcggtgggcaagagaatattaatagtttgacacattgtatcacacgtcttcgcttcaaattaaaagatgagagtcaagcgaatgatgatgtcttaaaaaatatggacggtgtggtaactgttatgaaaagcggtggacaataccaagtcgttattgggaaccatgttccagccgtttacgaagaagtagttagtattgcaggcttgtcaggagaacgtgaagaagaagcttccagtgggaatttatttgatcgcttaatagatattttaagtggttgtttccaaccctttttaggggcgttagcagcggctgggatggtcaaagggttaaatgccttattggttttcttaaagctctatacggctacgtcagggacttataccatgttaaatgggattggcgatgcaattttctactttatgccagttattttaggttatacagcagctaaaaaattccggttgcatccaatggtagggatcgtgattggcgcagctttatgttacccaacgattcaaggaagtgcattacaaacggcctttgaaacaacagcgggtgccggagccgcagcaccgtataatttattcggcttacctgcctataatacatttatggggattccttgggtcggtgcgaactatacaagtagtgtcgtaccaatcatcttcattattgcttttgcggcacaagttcaaaaagtgtttaaacgtattattccagaagttgttcaaacgttcttagtaccgtttttcgtcttgttgattgccttaccaattggtttcttagtaattgggccaatcgttagcatgctaacagatttattaagcgctggctttacagcattaatgagtttctcaccagctttgtatggtttgattcttggtttcttctggcaagtcttagttatttttggtttacattggagcgttgtgccattagctattatgcaagtgacacaagaaggttcaagccaagtattaacgggatcatttgcagctagttttgcgcaaacagcggttgttttagcgatgttcttcaaattgaaagataaaaagttaaaagctttgtgtccgccagcaattatctctggtatttttggtgtaacagagccagcaatttatggaatcactttaccaaaaaaatggccatttatttattcaatgattggtggcgctgtcggtggtttatatttgatgatcaacaatgtgacagcttatacaatgggtggtttaggaattttcggtgtgctaaactttatcaatggtgatgatgcaagtgggatgattcagtcctttattgcaattgccattgcagcggtcgttggttttggtctaacattcttcttctggaaagacaatacagttgaggaagaagaagtgattattgataaaacaacgattaaaaaagaaaatattacaagtccagtcaaaggacgagtgttatctttaaaaaatgcagaggatcctgcttttgcaaatggagctttaggaaatggagtcgtgattgaaccaacggaaggtaaagtggttgcaccctttgatggaacgattgtcacactattcccaacaaaacatgcattaggtttgatttcagataacggcacagaattattgattcatattgggattgatacagttcaattagaaggcgaaggctttgaagcttttgtaaaacaaggtgaccgcgtgaaaaaaggtcaaacattagtaacctttgatttagaaggaattaaaaaagctgggtttagtacacaaattccaatcgttgtgacgaatacagcggattatttagatattttggaagtcggcagtaatgaagtttcaacaagtgatgatttgctgaccgctttaatataa

SEQ ID NO: 264 - protein, 632 aa, Enterococcus faecalis; identical to SEQ ID NO: 66

SEQ ID NO: 265 - DNA, 1896 bp, Enterococcus faecalis; identical to SEQ ID NO: 197

SEQ ID NO: 266 - protein, 631 aa, Enterococcus faecalis; identical to SEQ ID NO: 198

SEQ ID NO: 267 - DNA, 1899 bp, Enterococcus faecalis; identical to SEQ ID NO: 46

SEQ ID NO: 268 - protein, 632 aa, Enterococcus faecalis; identical to SEQ ID NO: 66

SEQ ID NO: 269 - DNA, 1899 bp, Enterococcus faecalis; identical to SEQ ID NO: 46

SEQ ID NO: 270 - protein, 632 aa, Enterococcus faecalis; identical to SEQ ID NO: 66

SEQ ID NO: 271 - DNA, 1080 bp, Enterococcus faecalis
atgtttttaggatttaatgaaatgaagtattcaaaaggacggtacgtccttgtagttttagtaatggtcttgattgcttggttaatttttattttgtcaggtttagcgaacggtttagctcaaggaaatcgtttagccgtagatcaatggcaagcgaatcaagtggttttatcaaaagaggccaatagtaatttaaatgtatcagtgttagatgaaaacgtgaaagaaacgatttcaggaggcaaaattgcaccgattggtcaacagtcgttagccatccgcccagcagatgacaaaaaggctgaattaacgaatgttagcttatttgggattgaaaaagaaagttttttaatgccaaaagtgattgaaggaaacgcatttactgataaaaatcaagtgattgcttcagaaacattgaaaaatcaaggatttaaaattggcgacaaattaactgcagggaaatatgatgagcaattagaaattgtcggctttatttctaaaagtagctataacattgtgccggttatttacacttctctggatacttggcggtcaattaaatatggtgacaatccagcaatggccaaaatggttaatggtttcattgttcgcagcaaggacaacgcggaagttaaaacgactaataaagacagccaagttctttcaatttcagattttattgaaaaactgccaggatacagcgctcaaaacttgaccttggatggcatgatttatttcttgattgtgattgcagcgttcattatcggtatttttatctttgtgatgactttacagaaaacagcaatgttcggtgtcttaaaagttcaaggggtgccgactagtttcttagcaaaggcagtcatgctacaaaccgctttattggctgttctaggagtggcgattggtcttgctttaacgggaattaccgtgctctttttaccagaagcgatgccttatgcaactaatggaccacgcatgattttgtttagtgtactattgattttatctgcattaattggcggggcattttcaattcgaacgattgctaaaattgatccgttaatcgcgattggaggttag

SEQ ID NO: 272 - protein, 359 aa, Enterococcus faecalis
MFLGFNEMKYSKGRYVLVVLVMVLIAWLIFILSGLANGLAQGNRLAVDQWQANQVVLSKEANSNLNVSVLDENVKETISGGKIAPIGQQSLAIRPADDKKAELTNVSLFGIEKESFLMPKVIEGNAFTDKNQVIASETLKNQGFKIGDKLTAGKYDEQLEIVGFISKSSYNIVPVIYTSLDTWRSIKYGDNPAMAKMVNGFIVRSKDNAEVKTTNKDSQVLSISDFIEKLPGYSAQNLTLDGMIYFLIVIAAFIIGIFIFVMTLQKTAMFGVLKVQGVPTSFLAKAVMLQTALLAVLGVAIGLALTGITVLFLPEAMPYATNGPRMILFSVLLILSALIGGAFSIRTIAKIDPLIAIGG

SEQ ID NO: 273 - DNA, 1080 bp, Enterococcus faecalis
atgtttttaggatttaatgaaatgaagtattcaaaaggacggtacgtccttgtagtcttagtaatggtcttgattgcttggttaatttttattttgtcaggtttagcgaacggtttagctcaaggaaatcgtttagccgtagatcaatggcaagcgaatcaagtggttttatcaaaagaggccaatagtaatttaaatgtatcagtgttagatgaaaacgtgaaagaaacgatttcaggaggcaaaattgcaccgattggtcaacaatctttagccatccgcccagcagatgataaaaaggctgaattaacgaatgttagcttatttgggattgaaaaagaaagttttttaatgccaaaagtgattgaaggaaacgcatttactgataaaaatcaagtgattgcttcagaaacattgaaaaatcaaggatttaaaattggcgacaaattaactgcagggaaatatgatgagcaattagaaattgtcggctttatttctaaaagtagctataacattgtgccagttatttacacttctctggatacttggcggtcaattaaatatggtgacaatccagcaatggccaaaatggttaatggtttcattgttcgcagcaaggacaacgcggaagttaaaacgactaataaagacagccaagttctttcaatttcagattttattgaaaaactgccaggatacagcgctcaaaacttgaccttggatggcatgatttatttcttgattgtgattgcagcgttcattatcggtatttttatctttgtgatgactttacagaaaacagcaatgttcggtgtcttaaaagttcaaggggtgccgactagtttcttagcaaaggcagtcatgctacaaaccgctttattggctgttctaggagtggcgattggtcttgctttaacgggaattaccgtgctctttttaccagaagcgatgccttatgcaactaatggaccacgcatgattttgtttagtgtactattgattttatctgcattaattggcggggcattttcaattcgaacgattgctaaaattgatccgttaatcgcgattggaggttag

SEQ ID NO: 274 - protein, 359 aa, Enterococcus faecalis; identical to SEQ ID NO: 272

SEQ ID NO: 275 - DNA, 1080 bp, Enterococcus faecalis
atgtttttaggatttaatgaaatgaagtattcaaaaggacggtacgtccttgtagtcttagtaatggtcttgattgcttggttaatttttattttgtcaggtttagcgaacggtttagctcaaggaaatcgtttagccgtagatcaatggcaagcgaatcaagtggttttatcaaaagaggccaatagtaatttaaatgtatcagtgttagatgaaaacgtgaaagaaacgatttcaggaggcaaaattgcaccgattggtcaacaatctttagccatccgcccagcagatgacaaaaaggctgaattaacgaatgttagcttatttgggattgaaaaagaaagttttttaatgccaaaagtgattgaaggaaacgcatttactgataaaaatcaagtgattgcttcagaaacattgaaaaatcaaggatttaaaattggcgacaaattaactgcagggaaatatgatgagcaattagaaattgtcggctttatttctaaaagtagctataacattgtgccagttatttacacttctctggatacttggcggtcaattaaatatggtgacaatccagcaatggccaaaatggttaatggtttcattgttcgcagcaaggacaacgcggaagttaaaacgactaataaagacagccaagttctttcaatttcagattttattgaaaaactgccaggatacagcgctcaaaacttgaccttggatggcatgatttatttcttgattgtgattgcagcgttcattatcggtatttttatctttgtgatgactttacagaaaacagcaatgttcggtgtcttaaaagttcaaggggtgccgactagtttcttagcaaaggcagtcatgctacaaaccgctttattggctgttctaggagtggcgattggtcttgctttaacgggaattaccgtgctctttttaccagaagcgatgccttatgcaactaatggaccacgcatgattttgtttagtgtactattgattttatctgcattaattggcggggcattttcaattcgaacgattgctaaaattgatccgttaatcgcgattggaggttag

SEQ ID NO: 276 - protein, 359 aa, Enterococcus faecalis; identical to SEQ ID NO: 272

SEQ ID NO: 277 - DNA, 1080 bp, Enterococcus faecalis
atgtttttaggatttaatgaaatgaagtattcaaaaggacggtacgtccttgtagtcttagtaatggtcttgattgcttggttaatttttattttgtcaggtttagcgaacggtttagctcaaggaaatcgtttagccgtagatcaatggcaagcgaatcaagtggttttatcaaaagaggccaatagtaatttaaatgtatcagtgttagatgaaaacgtgaaagagacgatttcaggaggcaaaattgcaccgattggtcaacagtcgttagccatccgcccagcagatgataaaaaggctgaattaacgaatgttagcttatttgggattgaaaaagaaagttttttaatgccaaaagtgattgaaggaaacgcatttactgataaaaatcaagtgattgcttcagaaacattgaaaaatcaaggatttaaaattggcgacaaattaactgcaggaaaatatgatgagcaattagaaattgtcggctttatttctaaaagtagctataacattgtgccagttatttacacttctctggatacttggcggtcaattaaatatggtgacaatccagcaatggccaaaatggttaatggttttattgttcgcagcaaggataacgcggaagttaaaacgactaataaagacagccaagttctttcaatttcagattttattgaaaaactgccaggatacagcgctcaaaacttgaccttggatggcatgatttatttcttgattgtgattgcagcgttcattatcggtatttttatctttgtgatgactttacagaaaacagcaatgttcggtgtcttaaaagttcaaggggtgccgactagtttcttagcaaaggcagtcatgctacaaaccgctttattggctgttctaggagtggcgattggtcttgctttaacgggaattaccgtgctctttttaccagaagcgatgccttatgcaactaatggaccacgcatgattttgtttagtgtactattgattttatctgcattaattggcggggcattttcaattcgaacgattgctaaaattgatccgttaatcgcgattggaggttag

SEQ ID NO: 278 - protein, 359 aa, Enterococcus faecalis; identical to SEQ ID NO: 272

SEQ ID NO: 279 - DNA, 1080 bp, Enterococcus faecalis
atgtttttaggatttaatgaaatgaagtattcaaaaggacggtacgtccttgtagtcttagtaatggtcttgattgcttggttaatttttattttgtcaggtttagcgaacggtttagctcaaggaaatcgtttagccgtagatcaatggcaagcgaatcaagtggttttatcaaaagaggccaatagtaatttaaatgtatcagtgttagatgaaaacgtgaaagagacgatttcaggaggcaaaattgcaccgattggtcaacagtcgttagccatccgcccagcagatgataaaaaggctgaattaacgaatgttagcttatttgggattgaaaaagaaagttttttaatgccaaaagtgattgaaggaaacgcatttactgataaaaatcaagtgattgcttcagaaacattgaaaaatcaaggatttaaaattggcgacaaattaactgcagggaaatatgatgagcaattagaaattgtcggctttatttctaaaagtagctataacattgtgccagttatttacacttctctggatacttggcggtcaattaaatatggtgacaatccagcaatggccaaaatggttaatggtttcattgttcgaagcaaggacaacgcggaagttaaaacgactaataaagacagccaagttctttcaatttcagattttattgaaaaactgccaggatacagcgctcaaaacttgaccttggatggcatgatttatttcttgattgtgattgcagcgttcattatcggtatttttatctttgtgatgactttacagaaaacagcaatgttcggtgtcttaaaagttcaaggggtgccgactagtttcttagcaaaggcagtcatgctacaaaccgctttattggctgttctaggagtggcgattggtcttgctttaacaggaattaccgtgctctttttaccagaagcgatgccttatgcaactaatggaccacgcatgattttgtttagtgtactattgattttatctgcattaattggcggggcattttcaattcgaacgattgctaaaattgatccgttaatcgcgattggaggttaa

SEQ ID NO: 280 - protein, 359 aa, Enterococcus faecalis; identical to SEQ ID NO: 272

SEQ ID NO: 281 - DNA, 1080 bp, Enterococcus faecalis
atgtttttaggatttaatgaaatgaagtattcaaaaggacggtacgtccttgtagttttagtaatggtcttgattgcttggttaatttttattttgtcaggtttagcgaacggtttagctcaaggaaatcgtttagccgtagatcaatggcaagcgaatcaagtggttttatcaaaagaggccaatagtaatttaaatgtatcagtgttagatgaaaacgtgaaagaaacgatttcaggaggcaaaattgcaccgattggtcaacagtcgttagccatccgcccagcagatgacaaaaaggctgaattaacgaatgttagcttatttgggattgaaaaagaaagttttttaatgccaaaagtgattgaaggaaacgcatttactgataaaaatcaagtgattgcttcagaaacattgaaaaatcaaggatttaaaattggcgacaaattaactgcagggaaatatgatgagcaattagaaattgtcggctttatttctaaaagtagctataacattgtgccagttatttacacttctctggatacttggcggtcaattaaatatggtgacaatccagcaatggccaaaatggttaatggttttattgttcgcagcaaggataacgcggaagttaaaacgactaataaagacagccaagttctttcaatttcagattttattgaaaaactgccaggatacagcgctcaaaacttgaccttggatggcatgatttatttcttgattgtgattgcagcgttcattatcggtatttttatctttgtgatgactttacagaaaacagcaatgttcggtgtcttaaaagttcaaggggtgccgactagtttcttagcaaaggcagtcatgctacaaaccgctttattggctgttctaggagtggcgattggtcttgctttaacgggaattaccgtgctctttttaccagaagcgatgccttatgcaactaatggaccacgcatgattttgtttagtgtactattgattttatctgcattaattggcggggcattttcaattcgaacgattgctaaaattgatccgttaatcgcgattggaggttag

SEQ ID NO: 282 - protein, 359 aa, Enterococcus faecalis; identical to SEQ ID NO: 272

SEQ ID NO: 283 - DNA, 1080 bp, Enterococcus faecalis
atgtttttaggatttaatgaaatgaagtattcaaaaggacggtacgtccttgtagtcttagtaatggtcttgattgcttggttaatttttattttgtcaggtttagcgaacggtttagctcaaggaaatcgtttagccgtagatcaatggcaagcgaatcaagtggttttatcaaaagaggccaatagtaatttaaatgtatcagtgttagatgaaaacgtgaaagagacgatttcaggaggcaaaattgcaccgattggtcaacagtcgttagccatccgcccagcagatgataaaaaggctgaattaacgaatgttagcttatttgggattgaaaaagaaagttttttaatgccaaaagtgatcgaaggaaacgcatttactgataaaaatcaagtgattgcttcagaaacattgaaaaatcaaggatttaaaattggcgacaaattaactgcagggaaatatgatgagcaattagaaattgtcggctttatttctaaaagtagctataacattgtgccagttatttacacttctctggatacttggcggtcaattaaatatggtgacaatccagcaatggccaaaatggttaatggttttattgttcgcagcaaggataacgcggaagttaaaacgactaataaagacagccaagttctttcaatttcagattttattgaaaaactgccaggatacagcgctcaaaacttgaccttggatggcatgatttatttcttgattgtgattgcagcgttcattatcggtatttttatctttgtgatgactttacagaaaacagcaatgttcggtgtcttaaaagttcaaggggtgccgactagtttcttagcaaaggcagtcatgctacaaaccgctttattggctgttctaggagtggcgattggtcttgctttaacgggaattaccgtgctctttttaccagaagcgatgccttatgcaactaatggaccacgcatgattttgtttagtgtactattgattttatctgcattaattggcggggcattttcaattcgaacgattgctaaaattgatccgttaatcgcgattggaggttag

SEQ ID NO: 284 - protein, 359 aa, Enterococcus faecalis; identical to SEQ ID NO: 272

SEQ ID NO: 285 - DNA, 1080 bp, Enterococcus faecalis; identical to SEQ ID NO: 283

SEQ ID NO: 286 - protein, 359 aa, Enterococcus faecalis; identical to SEQ ID NO: 272

SEQ ID NO: 287 - DNA, 1080 bp, Enterococcus faecalis
atgtttttaggatttaatgaaatgaagtattcaaaaggacggtacgtccttgtagtcttagtaatggtcttgattgcttggttaatttttattttgtcaggtttagcgaacggtttagctcaaggaaatcgtttagccgtagatcaatggcaagcgaatcaagtggttttatcaaaagaggccaatagtaatttaaatgtatcagtgttagatgaaaacgtgaaagaaacgatttcaggaggcaaaattgcaccgattggtcaacaatctttagccatccgcccagcagatgacaaaaaggctgaattaacgaatgttagcttatttggaattgaaaaagaaagttttttaatgccaaaagtgattgaaggaaacgcatttactgataaaaatcaagtgattgcttcagaaacattgaaaaatcaaggatttaaaattggcgacaaattaactgcagggaaatatgatgagcaattagaaattgtcggctttatttctaaaagtagctataacattgtgccagttatttacacttctctggatacttggcggtcaattaaatatggtgacaatccagcaatggccaaaatggttaatggtttcattgttcgcagcaaggacaacgcggaagttaaaacgactaataaagacagccaagttctttcaatttcagattttattgaaaaactaccaggatacagcgctcaaaacttgaccttggatggcatgatttatttcttgattgtgattgcagcgttcattatcggtatttttatctttgtgatgactttacagaaaacagcaatgttcggtgtcttaaaagttcaaggggtgccgactagtttcttagcaaaggcagtcatgctacaaaccgctttattggctgttctaggagtggcgattggtcttgctttaacgggaattaccgtgctctttttaccagaagcgatgccttatgcaactaatggaccacgcatgattttgtttagtgtactattgattttatctgcattaattggcggggcattttcaattcgaacgattgctaaaattgatccgttaatcgcgattggaggttag

SEQ ID NO: 288 - protein, 359 aa, Enterococcus faecalis; identical to SEQ ID NO: 272

SEQ ID NO: 289 - DNA, 1080 bp, Enterococcus faecalis
atgtttttaggatttaatgaaatgaagtattcaaaaggacggtacgtccttgtagtcttagtaatggtcttgattgcttggttaatttttattttgtcaggtttagcgaacggtttagctcaaggaaatcgtttagccgtagatcaatggcaagcgaatcaagtggttttatcaaaagaggccaatagtaatttaaatgtatcagtgttagatgaaaacgtgaaagaaacgatttcaggaggcaaaattgcaccgattggtcaacaatctttagccatccgcccagcagatgataaaaaggctgaattaacgaatgttagcttatttgggattgaaaaagaaagttttttaatgccaaaagtgattgaaggaaacgcatttactgataaaaatcaagtgattgcttcagaaacattgaaaaatcaaggatttaaaattggcgacaaattaactgcagggaaatatgatgagcaattagaaattgtcggctttatttctaaaagtagctataacattgtgccagttatttacacttctctggatacttggcggtcaattaaatatggtgacaatccagcaatggccaaaatggttaatggtttcattgttcgcagcaaggacaacgcggaagttaaaacgactaataaagacagccaagttctttcaatttcagattttattgaaaaactaccaggatacagcgctcaaaacttgaccttggatggcatgatttatttcttgattgtgattgcagcgttcattatcggtatttttatctttgtgatgactttacagaaaacagcaatgttcggtgtcttaaaagttcaaggggtgccgactagtttcttagcaaaggcagtcatgctacaaaccgctttattggctgttctaggagtggcgattggtcttgctttaacgggaattaccgtgctctttttaccagaagcgatgccttatgcaactaatggaccacgcatgattttgtttagtgtactattgattttatctgcattaattggcggggcattttcaattcgaacgattgctaaaattgatccgttaatcgcgattggaggttaa

SEQ ID NO: 290 - protein, 359 aa, Enterococcus faecalis; identical to SEQ ID NO: 272

SEQ ID NO: 291 - DNA, 1080 bp, Enterococcus faecalis
atgtttttaggatttaatgaaatgaagtattcaaaaggacggtacgtccttgtaatcttagtaatggtcttgattgcttggttaatttttattttgtcaggtttagcgaacggtttagctcaaggaaatcgtttagccgtagatcaatggcaagcgaatcaagtggttttatcaaaagaggccaatagtaatttaaatgtatcagtgttaaatgaaaacgtgaaagaaacgatttcaggaggcaaaattgcaccgattggtcaacagtcgttagctatccgcccagcagatgacaaaaaggctgaattaacgaatgttagcttatttgggattgaaaaagaaagttttttaatgccaaaagtgattgaaggaaacgcatttactgataaaaatcaagtgattgcttcagaaacattgaaaaatcaaggatttaaaattggcgacaaattaactgcagggaaatatgatgagcaattagaaattgtcggctttatttctaaaagtagctataacattgtgccagttatttacacttctctggatacttggcggtcaattaaatatggtgacaatccagcaatggccaaaatggttaatggtttcattgttcgcagcaaggacaacgcggaagttaaaacgactaataaagacagccaagttctttcaatttcagattttattgaaaaactgccaggatacagcgctcaaaacttgaccttggatggcatgatttatttcttgattgtgattgcagcgttcattatcggtatttttatctttgtgatgactttacagaaaacagcaatgttcggtgtcttaaaagttcaaggggtgccaactagtttcttagcaaaggcagtcatgctacaaaccgctttattggctgttctaggagtggcgattggtcttgctttaacgggaattaccgtgctttttttaccagaagcgatgccttatgcaactaatggaccacgcatgattttgtttagtgtactattgattttatctgcattaattggcggggcattttcaattcgaacgattgctaaaattgatccgttaatcgcgattggaggttag

SEQ ID NO: 292 - protein, 359 aa, Enterococcus faecalis
MFLGFNEMKYSKGRYVLVILVMVLIAWLIFILSGLANGLAQGNRLAVDQWQANQVVLSKEANSNLNVSVLNENVKETISGGKIAPIGQQSLAIRPADDKKAELTNVSLFGIEKESFLMPKVIEGNAFTDKNQVIASETLKNQGFKIGDKLTAGKYDEQLEIVGFISKSSYNIVPVIYTSLDTWRSIKYGDNPAMAKMVNGFIVRSKDNAEVKTTNKDSQVLSISDFIEKLPGYSAQNLTLDGMIYFLIVIAAFIIGIFIFVMTLQKTAMFGVLKVQGVPTSFLAKAVMLQTALLAVLGVAIGLALTGITVLFLPEAMPYATNGPRMILFSVLLILSALIGGAFSIRTIAKIDPLIAIGG

SEQ ID NO: 293 - DNA, 1080 bp, Enterococcus faecalis; identical to SEQ ID NO: 289

SEQ ID NO: 294 - protein, 359 aa, Enterococcus faecalis; identical to SEQ ID NO: 272

SEQ ID NO: 295 - DNA, 1080 bp, Enterococcus faecalis
atgtttttaggatttaatgaaatgaagtattcaaaaggacggtacgtccttgtagtcttagtaatggtcttgattgcttggttaatttttattttgtcaggtttagcgaacggtttagctcaaggaaatcgtttagccgtagatcaatggcaagcgaatcaagtggttttatcaaaagaggccaatagtaatttaaatgtatcagtgttagatgaaaacgtgaaagaaacgatttcaggaggcaaaattgcaccgattggtcaacaatctttagccatccgcccagcagatgataaaaaggctgaattaacgaatgttagcttatttgggattgaaaaagaaagttttttaatgccaaaagtgattgaaggaaacgcatttactgataaaaatcaagtgattgcttcagaaacattgaaaaatcaaggatttaaaattggcgacaaattaactgcggggaaatatgatgagcaattagaaattgtcggctttatttctaaaagtagctataacattgtgccagttatttacacttctctggatacttggcggtcaattaaatatggtgacaatccagcaatggccaaaatggttaatggtttcattgttcgcagcaaggacaacgcggaagttaaaacgactaataaagacagccaagttctttcaatttcagattttattgaaaaactgccaggatacagcgctcaaaacttgaccttggatggcatgatttatttcttgattgtgattgcagcgttcattatcggtatttttatctttgtgatgactttacagaaaacagcaatgttcggtgtcttaaaagttcaaggggtgccgactagtttcttagcaaaggcagtcatgctacaaaccgctttattggctgttctaggagtggcgattggtcttgctttaacgggaattaccgtgctctttttaccagaagcgatgccttatgcaactaatggaccacgcatgattttgtttagtgtactattgattttatctgcattaattggcggggcattttcaattcgaacgattgctaaaattgatccgttaatcgcgattggaggttaa

SEQ ID NO: 296 - protein, 359 aa, Enterococcus faecalis; identical to SEQ ID NO: 272

SEQ ID NO: 297 - DNA, 1080 bp, Enterococcus faecalis; identical to SEQ ID NO: 271

SEQ ID NO: 298 - protein, 359 aa, Enterococcus faecalis; identical to SEQ ID NO: 272

SEQ ID NO: 299 - DNA, 1080 bp, Enterococcus faecalis
atgtttttaggatttaatgaaatgaagtattcaaaaggacggtacgtccttgtagtcttagtaatggtcttgattgcttggttaatttttattttgtcaggtttagcgaacggtttagctcaaggaaatcgtttagccgtagatcaatggcaagcgaatcaagtggttttatcaaaagaggccaatagtaatttaaatgtatcagtgttagatgaaaacgtgaaagaaacgatttcaggaggcaaaattgcaccgattggtcaacaatctttagccatccgcccagcagatgataaaaaggctgaattaacgaatgttagcttatttgggattgaaaaagaaagttttttaatgccaaaagtgattgaaggaaacgcatttactgataaaaatcaagtgattgcttcagaaacattgaaaaatcaaggatttaaaattggcgacaaattaactgcagggaaatatgatgagcaattagaaattgtcggctttatttctaaaagtagctataacattgtgccagttatttacacttctctggatacttggcggtcaattaaatatggtgacaatccagcaatggccaaaatggttaatggtttcattgttcgcagcaaggacaacgcggaagttaaaacgactaataaagacagccaagttctttcaatttcagattttattgaaaaactaccaggatacagcgctcaaaacttgaccttggatggcatgatttatttcttgattgtgattgcagcgttcattatcggtatttttatctttgtgatgactttacagaaaacagcaatgttcggtgtcttaaaagttcaaggggtgccgactagtttcttagcaaaggcagtcatgctacaaaccgctttattggctgttctaggagtggcgattggtcttgctttaacgggaattaccgtgctctttttaccagaagcgatgccttatgcaactaatggaccacgcatgattttgtttagtgtactattgattttatctgcattaattggcggggcattttcaattcgaacgattgctaaaattgatccgttaatcgcgattggaggttag

SEQ ID NO: 300 - protein, 359 aa, Enterococcus faecalis; identical to SEQ ID NO: 272

SEQ ID NO: 301 - DNA, 1080 bp, Enterococcus faecalis
atgtttttaggatttaatgaaatgaagtattcaaaaggacggtacgtccttgtagtcttagtaatggtcttgattgcttggttaatttttattttgtcaggtttagcgaacggtttagctcaaggaaatcgtttagccgtagatcaatggcaagcgaatcaagtggttttatcaaaagaggccaatagtaatttaaatgtatcagtgttagatgaaaacgtgaaagagacgatttcaggaggcaaaattgcaccgattggtcaacagtcgttagccatccgcccagcagatgataaaaaggctgaattaacgaatgttagcttatttgggattgaaaaagaaagttttttaatgccaaaagtgattgaaggaaacgcatttactgataaaaatcaagtgattgcttcagaaacattgaaaaatcaaggatttaaaattggcgacaaattaactgcagggaaatatgatgagcaattagaaattgtcggctttatttctaaaagtagctataacattgtgccagttatttacacttctctggatacttggcggtcaattaaatatggtgacaatccagcaatggccaaaatggttaatggttttattgttcgcagcaaggataacgcggaagttaaaacgactaataaagacagccaagttctttcaatttcagattttattgaaaaactgccaggatacagcgctcaaaacttgaccttggatggcatgatttatttcttgattgtgattgcagcgttcattatcggtatttttatctttgtgatgactttacagaaaacagcaatgttcggtgtcttaaaagttcaaggggtgccgactagtttcttagcaaaggcagtcatgctacaaaccgctttattggctgttctaggagtggcgattggtcttgctttaactggaattaccgtgctctttttaccagaagcgatgccttatgcaactaatggaccacgcatgattttgtttagtgtactattgattttatctgcattaattggcggggcattttcaattcgaacgattgctaaaattgatccgttaatcgcgattggaggttaa

SEQ ID NO: 302 - protein, 359 aa, Enterococcus faecalis; identical to SEQ ID NO: 272

SEQ ID NO: 303 - DNA, 1080 bp, Enterococcus faecalis
atgtttttaggatttaatgaaatgaagtattcaaaaggacggtacgtccttgtagtcttagtaatggtcttgattgcttggttaatttttattttgtcaggtttagcgaacggtttagctcaaggaaatcgtttagccgtagatcaatggcaagcgaatcaagtggttttatcaaaagaggccaatagtaatttaaatgtatcagtgttagatgaaaacgtgaaagaaacgatttcaggaggcaaaattgcaccgattggtcaacaatctttagccatccgcccagcagatgacaaaaaggctgaattaacgaatgttagcttatttgggattgaaaaagaaagttttttaatgccaaaagtgattgaaggaaacgcatttactgataaaaatcaagtgattgcttcagaaacattgaaaaatcaaggatttaaaattggcgacaaattaactgcagggaaatatgatgagcaattagaaattgtcggctttatttctaaaagtagctataacattgtgccagttatttacacttctctggatacttggcggtcaattaaatatggtgacaatccagcaatggccaaaatggttaatggtttcattgttcgcagcaaggacaacgcggaagttaaaacgactaataaagacagccaagttctttcaatttcagattttattgaaaaactgccaggatacagcgctcaaaacttgaccttggatggcatgatttatttcttgattgtgattgcagcgttcattatcggtatttttatctttgtgatgactttacagaaaacagcaatgttcggtgtcttaaaagttcaaggggtgccgactagtttcttagcaaaggcagtcatgctacaaaccgctttattggctgttctaggagtggcgattggtcttgctttaacgggaattaccgtgctctttttaccagaagcaatgccttatgcaactaatggaccacgcatgattttgtttagtgtactattgattttatctgcattaattggcggggcattttcaattcgaacgattgctaaaattgatccgttaatcgcgattggaggttag

SEQ ID NO: 304 - protein, 359 aa, Enterococcus faecalis; identical to SEQ ID NO: 272

SEQ ID NO: 305 - DNA, 1080 bp, Enterococcus faecalis; identical to SEQ ID NO: 289

SEQ ID NO: 306 - protein, 359 aa, Enterococcus faecalis; identical to SEQ ID NO: 272

SEQ ID NO: 307 - DNA, 1080 bp, Enterococcus faecalis; identical to SEQ ID NO: 283

SEQ ID NO: 308 - protein, 359 aa, Enterococcus faecalis; identical to SEQ ID NO: 272

SEQ ID NO: 309 - DNA, 1080 bp, Enterococcus faecalis; identical to SEQ ID NO: 283

SEQ ID NO: 310 - protein, 359 aa, Enterococcus faecalis; identical to SEQ ID NO: 272

SEQ ID NO: 311 - DNA, 1080 bp, Enterococcus faecalis; identical to SEQ ID NO: 289

SEQ ID NO: 312 - protein, 359 aa, Enterococcus faecalis; identical to SEQ ID NO: 272

SEQ ID NO: 313 - DNA, 1080 bp, Enterococcus faecalis; identical to SEQ ID NO: 289

SEQ ID NO: 314 - protein, 359 aa, Enterococcus faecalis; identical to SEQ ID NO: 272

SEQ ID NO: 315 - DNA, 1080 bp, Enterococcus faecalis
atgtttttaggatttaatgaaatgaagtattcaaaaggacggtacgtccttgtagtcttagtaatggtcttgattgcttggttaatttttattttgtcaggtttagcgaacggtttagctcaaggaaatcgtttagccgtagatcaatggcaagcgaatcaagtggttttatcaaaagaggccaatagtaatttaaatgtatcagtgttagatgaaaacgtgaaagagacgatttcaggaggcaaaattgcaccgattggtcaacagtcgttagccatccgcccagcagatgataaaaaggctgaattaacgaatgttagcttatttgggattgaaaaagaaagttttttaatgccaaaagtgatcgaaggaaacgcatttactgataaaaatcaagtgattgcttcagaaacattgaaaaatcaaggatttaaaattggcgacaaattaactgcagggaaatatgatgagcaattagaaattgtcggctttatttctaaaagtagctataacattgtgccagttatttacacttctctggatacttggcggtcaattaaatatggtgacaatccagcaatggtcaaaatggttaatggttttattgttcgcagcaaggataacgcggaagttaaaacgactaataaagacagccaagttctttcaatttcagattttattgaaaaactgccaggatacagcgctcaaaacttgaccttggatggcatgatttatttcttgattgtgattgcagcgttcattatcggtatttttatctttgtgatgactttacagaaaacagcaatgttcggtgtcttaaaagttcaaggggtgccgactagtttcttagcaaaggcagtcatgctacaaaccgctttattggctgttctaggagtggcgattggtcttgctttaacgggaattaccgtgctctttttaccagaagcgatgccttatgcaactaatggaccacgcatgattttgtttagtgtactattgattttatctgcattaattggcggggcattttcaattcgaacgattgctaaaattgatccgttaatcgcgattggaggttag

SEQ ID NO: 316 - protein, 359 aa, Enterococcus faecalis
MFLGFNEMKYSKGRYVLVVLVMVLIAWLIFILSGLANGLAQGNRLAVDQWQANQVVLSKEANSNLNVSVLDENVKETISGGKIAPIGQQSLAIRPADDKKAELTNVSLFGIEKESFLMPKVIEGNAFTDKNQVIASETLKNQGFKIGDKLTAGKYDEQLEIVGFISKSSYNIVPVIYTSLDTWRSIKYGDNPAMVKMVNGFIVRSKDNAEVKTTNKDSQVLSISDFIEKLPGYSAQNLTLDGMIYFLIVIAAFIIGIFIFVMTLQKTAMFGVLKVQGVPTSFLAKAVMLQTALLAVLGVAIGLALTGITVLFLPEAMPYATNGPRMILFSVLLILSALIGGAFSIRTIAKIDPLIAIGG

SEQ ID NO: 317 - DNA, 1080 bp, Enterococcus faecalis
atgtttttaggatttaatgaaatgaagtattcaaaaggacgatacgtccttgtagttttagtaatggtcttgattgcttggttaatttttattttgtcaggtttagcgaacggtttagctcaaggaaatcgtttagccgtagatcaatggcaagcgaatcaagtggttttatcaaaagaggccaatagtaatttaaatgtatcagtgttagatgaaaacgtgaaagaaacgatttcaggaggcaaaattgcaccgattggtcaacaatctttagccatccgcccagcagatgataaaaaggctgaattaacgaatgttagcttatttgggattgaaaaagaaagttttttaatgccaaaagtgattgaaggaaacgcatttactgataaaaatcaagtgattgcttcagaaacattgaaaaatcaaggatttaaaattggcgacaaattaactgcagggaaatatgatgagcaattagaaattgtcggctttatttctaaaagtagctataacattgtgccagttatttacacttctctggatacttggcggtcaattaaatatggtgacaatccagcaatggccaaaatggttaatggtttcattgttcgcagcaaggacaacacggaagttaaaacgactaataaagacagccaagttctttcaatttcagattttattgaaaaactgccaggatacagcgctcaaaacttgaccttggatggcatgatttatttcttgattgtgattgcagcgttcattatcggtatttttatctttgtgatgactttacagaaaacagcaatgttcggtgtcttaaaagttcaaggggtgccgactagtttcttagcaaaggcagtcatgctacaaaccgctttattggctgttctaggagtggcgattggtcttgctttaacgggaattaccgtgctctttttaccagaagcgatgccttatgcaactaatggaccacgcatgattttgtttagtgtactattgattttatctgcattaattggcggggcattttcaattcgaacgattgctaaaattgatccgttaatcgcgattggaggttag

SEQ ID NO: 318 - protein, 359 aa, Enterococcus faecalis; identical to SEQ ID NO: 69

SEQ ID NO: 319 - DNA, 1080 bp, Enterococcus faecalis; identical to SEQ ID NO: 283

SEQ ID NO: 320 - protein, 359 aa, Enterococcus faecalis; identical to SEQ ID NO: 272

SEQ ID NO: 321 - DNA, 1080 bp, Enterococcus faecalis; identical to SEQ ID NO: 271

SEQ ID NO: 322 - protein, 359 aa, Enterococcus faecalis; identical to SEQ ID NO: 272

SEQ ID NO: 323 - DNA, 1080 bp, Enterococcus faecalis
atgtttttaggatttaatgaaatgaagtattcaaaaggacggtacgtccttgtagttttagtaatggtcttgattgcttggttaatttttattttgtcaggtttagcgaacggtttagctcaaggaaatcgtttagccgtagatcaatggcaagcgaatcaagtggttttatcaaaagaggccaatagtaatttaaatgtatcagtgttagatgaaaacgtgaaagaaacgatttcaggaggcaaaattgcaccgattggtcaacaatctttagccatccgcccagcagatgacaaaaaggctgaattaacgaatgttagcttatttgggattgaaaaagaaagttttttaatgccaaaagtgattaaaggaaacgcatttactgataaaaatcaagtgattgcttcagaaacattgaaaaatcaaggatttaaaattggcgacaaattaactgcagggaaatatgatgagcaattagaaattgtcggttttatttctaaaagtagctataacattgtgccagttatttacacttctctggatacttggcggtcaattaaatatggtgacaatccagcaatggccaaaatggttaatggtttcattgttcgcagcaaggacaacgcggaagttaaaacgactaataaagacagccaagttctttcaatttcagattttattgaaaaactgccaggatacagcgctcaaaacttgaccttggatggcatgatttatttcttgattgtgattgcagcgttcattatcggtatttttatctttgtgatgactttacagaaaacagcaatgttcggtgtcttaaaagttcaaggggtgccgactagtttcttagcaaaggcagtcatgctacaaaccgctttattggctgttctaggagtggcgattggtcttgctttaacgggaattaccgtgctctttttaccagaagcgatgccttatgcaactaatggaccacgcatgattttgtttagtgtactattgattttatctgcattaattggcggggcattttcaattcgaacgattgctaaaattgatccgttaatcgcgattggaggttag

SEQ ID NO: 324 - protein, 359 aa, Enterococcus faecalis
MFLGFNEMKYSKGRYVLVVLVMVLIAWLIFILSGLANGLAQGNRLAVDQWQANQVVLSKEANSNLNVSVLDENVKETISGGKIAPIGQQSLAIRPADDKKAELTNVSLFGIEKESFLMPKVIKGNAFTDKNQVIASETLKNQGFKIGDKLTAGKYDEQLEIVGFISKSSYNIVPVIYTSLDTWRSIKYGDNPAMAKMVNGFIVRSKDNAEVKTTNKDSQVLSISDFIEKLPGYSAQNLTLDGMIYFLIVIAAFIIGIFIFVMTLQKTAMFGVLKVQGVPTSFLAKAVMLQTALLAVLGVAIGLALTGITVLFLPEAMPYATNGPRMILFSVLLILSALIGGAFSIRTIAKIDPLIAIGG

SEQ ID NO: 325 - DNA, 1080 bp, Enterococcus faecalis; identical to SEQ ID NO: 277

SEQ ID NO: 326 - protein, 359 aa, Enterococcus faecalis; identical to SEQ ID NO: 272

SEQ ID NO: 327 - DNA, 1080 bp, Enterococcus faecalis
atgtttttaggatttaatgaaatgaagtattcaaaaggacggtacgtccttgtagtcttagtaatggtcttgattgcttggttaatttttattttgtcaggtttagcgaacggtttagctcaaggaaatcgtttagccgtagatcaatggcaagcgaatcaagtggttttatcaaaagaggccaatagtaatttaaatgtatcagtgttagatgaaaacgtgaaagaaacgatttcaggaggcaaaattgcactgattggtcaacaatctttagccatccgcccagcagatgacaaaaaggctgaattaacgaatgttagcttatttgggattgaaaaagaaagttttttaatgccaaaagtgattgaaggaaacgtatttactgataaaaatcaagtgattgcttcagaaacattgaaaaatcaaggatttaaaattggcgacaaattaactgcagggaaatatgatgagcaattagaaattgtcggctttatttctaaaagtagctataacattgtgccagttatttacacttctctggatacttggcggtcaattaaatatggtgacaatccagcaatggccaaaatggttaatggtttcattgttcgcagcaaggacaacgcggaagttaaaacgactaataaagacagccaagttctttcaatttcagattttattgaaaaactgccaggatacagcgctcaaaacttgaccttggatggcatgatttatttcttgattgtgattgcagcgttcattatcggtatttttatctttgtgatgactttacagaaaacagcaatgttcggtgtcttaaaagttcaaggggtgccgactagtttcttagcaaaggcagtcatgctacaaaccgctttattggctgttctaggagtggcgattggtcttgctttaacgggaattaccgtgctctttttaccagaagcgatgccttatgcaactaatggaccacgcatgattttgtttagtgtattattgattttatctgcattaattggcggggcgttttcaattcgaacgattgctaaaattgatccgttaatcgcgattggaggttag

SEQ ID NO: 328 - protein, 359 aa, Enterococcus faecalis
MFLGFNEMKYSKGRYVLVVLVMVLIAWLIFILSGLANGLAQGNRLAVDQWQANQVVLSKEANSNLNVSVLDENVKETISGGKIALIGQQSLAIRPADDKKAELTNVSLFGIEKESFLMPKVIEGNVFTDKNQVIASETLKNQGFKIGDKLTAGKYDEQLEIVGFISKSSYNIVPVIYTSLDTWRSIKYGDNPAMAKMVNGFIVRSKDNAEVKTTNKDSQVLSISDFIEKLPGYSAQNLTLDGMIYFLIVIAAFIIGIFIFVMTLQKTAMFGVLKVQGVPTSFLAKAVMLQTALLAVLGVAIGLALTGITVLFLPEAMPYATNGPRMILFSVLLILSALIGGAFSIRTIAKIDPLIAIGG

SEQ ID NO: 329 - DNA, 1080 bp, Enterococcus faecalis
atgtttttaggatttaatgaaatgaagtattcaaaaggacggtacgtccttgtagtcttagtaatggtcttgattgcttggttaatttttattttgtcaggtttagcgaacggtttagctcaaggaaatcgtttagccgtagatcaatggcaagcgaatcaagtggttttatcaaaagaggccaatagtaatttaaatgtatcagtgttagatgaaaacgtgaaagaaacgatttcaggaggcaaaattgcaccgattggtcaacagtcgttagccatccgcccagcagatgacaaaaaggctgaattaacgaatgttagcttatttgggattgaaaaagaaagttttttaatgccaaaagtgattgaaggaaacgcatttactgataaaaatcaagtgattgcttcagaaacattgaaaaatcaaggatttaaaattggcgacaaattaactgcagggaaatatgatgagcaattagaaattgtcggctttatttctaaaagtagctataacattgtgccggttatttacacttctctggatacttggcggtcaattaaatatggtgacaatccagcaatggccaaaatggttaatggtttcattgttcgcagcaaggacaacgcggaagttaaaacgactaataaagacagccaagttctttcaatttcagattttattgaaaaactgccaggatacagcgctcaaaacttgaccttggatggcatgatttatttcttgattgtgattgcagcgttcattatcggtatttttatctttgtgatgactttacagaaaacagcaatgttcggtgtcttaaaagttcaaggggtgccgactagtttcttagcaaaggcagtcatgctacaaaccgctttattggctgttctaggagtggcgattggtcttgctttaacgggaattaccgtgctctttttaccagaagcgatgccttatgcaactaatggaccacgcatgattttgtttagtgtactattgattttatctgcattaattggcggggcattttcaattcgaacgattgctaaaattgatccgttaatcgcgattggaggttag

SEQ ID NO: 330 - protein, 359 aa, Enterococcus faecalis; identical to SEQ ID NO: 272

SEQ ID NO: 331 - DNA, 1080 bp, Enterococcus faecalis; identical to SEQ ID NO: 271

SEQ ID NO: 332 - protein, 359 aa, Enterococcus faecalis; identical to SEQ ID NO: 272

SEQ ID NO: 333 - DNA, 1080 bp, Enterococcus faecalis
atgtttttaggatttaatgaaatgaagtattcaaaaggacggtacgtccttgtagtcttagtaatggtcttgattgcttggttaatttttattttgtcaggtttagcgaacggtttagctcaaggaaatcgtttagccgtagatcaatggcaagcgaatcaagtggttttatcaaaagaggccaatagtaatttaaatgtatcagtgttagatgaaaacgtgaaagaaacgatttcaggaggcaaaattgcaccgattggtcaacaatctttagccatccgcccagcagatgataaaaaggctgaattaacgaatgttagcttatttgggattgaaaaagaaagttttttaatgccaaaagtgattgaaggaaacgcatttactgataaaaatcaagtgattgcttcagaaacattgaaaaatcaaggatttaaaattggcgacaaattaactgcagggaaatatgatgagcaattagaaattgtcggctttatttctaaaagtagctataacattgtgccagttatttacacttctctggatacttggcggtcaattaaatatggtgacaatccagcaatggccaaaatggttaatggtttcattgttcgcagcaaggacaacgcggaagttaaaacgactaataaagacagccaagttctttcaatttcagattttattgaaaaactaccaggatacagcgctcaaaacttgaccttggatggcatgatttatttcttgattgtgattgcagcgttcattatcggtatttttatctttgtgatgactttacagaaaacagcaatgttcggtgtcttaaaagttcaaggggtgccgactagtttcttagcaaaggcagtcatgctacaaaccgctttattggctgttctaggagtggcgattggtcttgctttaacgggaattaccgtgctctttttaccagaagcgatgccttatgcaactaatggaccacgcatgattttgtttagtgtactattgattttatctgcattaattggcggggcattttcaattcgaacgattgctaaaattgatccgttaatagcgattggaggttaa

SEQ ID NO: 334 - protein, 359 aa, Enterococcus faecalis; identical to SEQ ID NO: 272

SEQ ID NO: 335 - DNA, 1080 bp, Enterococcus faecalis
atgtttttaggatttaatgaaatgaagtattcaaaaggacggtacgtccttgtagtcttagtaatggtcttgattgcttggttaatttttattttgtcaggtttagcgaacggtttagctcaaggaaatcgtttagccgtagatcaatggcaagcgaatcaagtggttttatcaaaagaggccaatagtaatttaaatgtatcagtgttagatgaaaacgtgaaagagacgatttcaggaggcaaaattgcaccgattggtcaacagtcgttagccatccgcccagcagatgataaaaaggctgaattaacgaatgttagcttatttgggattgaaaaagaaagttttttaatgccaaaagtgattgaaggaaacgcatttactgataaaaatcaagtgattgcttcagaaacattgaaaaatcaaggatttaaaattggcgacaaattaactgcagggaaatatgatgagcaattagaaattgtcggctttatttctaaaagtagctataacattgtgccagttatttacacttctctggatacttggcggtcaattaaatatggtgacaatccagcaatggccaaaatggttaatggtttcattgttcgcagcaaggacaacgcggaagttaaaacgactaataaagacagccaagttctttcaatttcagattttattgaaaaactgccaggatacagcgctcaaaacttgaccttggatggcatgatttatttcttgattgtgattgcagcgttcattatcggtatttttatctttgtgatgactttacagaaaacagcaatgttcggtgtcttaaaagttcaaggggtgccgactagtttcttagcaaaggcagtcatgctacaaaccgctttattggctgttctaggagtggcgattggtcttgctttaacgggaattaccgtgctctttttaccagaagcgatgccttatgcaactaatggaccacgcatgattttgtttagtgtactattgattttatctgcattaattggcggggcattttcaattcgaacgattgctaaaattgatccgttaatcgcgattggaggttag

SEQ ID NO: 336 - protein, 359 aa, Enterococcus faecalis; identical to SEQ ID NO: 272

SEQ ID NO: 337 - DNA, 1080 bp, Enterococcus faecalis
atgtttttaggatttaatgaaatgaagtattcaaaaggacggtacgtccttgtagtcttagtaatggtcttgattgcttggttaatttttattttgtcaggtttagcgaacggtttagctcaaggaaatcgtttagcggtagatcaatggcaagcgaatcaagtggttttatcaaaagaggccaatagtaatttaaatgtatcagtgttagatgagaacgtgaaagaaacgatttcaggaggcaaaattgcaccgattggtcaacagtcgttagccatccgcccagcagatgacaaaaaggctgaattaacgaatgttagcttatttgggattgaaaaagaaagttttttaatgccaaaagtgattgaaggaaacgcatttactgataaaaatcaagtgattgcttcagaaacattgaaaaatcaaggatttaaaattggcgacaaattaactgcagggaaatatgatgagcaattagaaattgtcggctttatttctaaaagtagctataacattgtgccggttatttacacttctctggatacttggcggtcaattaaatatggtgacaatccagcaatggccaaaatggttaatggtttcattgttcgcagcaaggacaacacggaagttaaaacgactaataaagacagccaagttctttcaatttcagattttattgaaaaactgccaggatacagcgctcaaaacttgaccttggatggcatgatttatttcttgattgtgattgcagcgttcattatcggtatttttatctttgtgatgactttacagaaaacagcaatgttcggtgtcttaaaagttcaaggggtgccgactagtttcttagcaaaggcagtcatgctacaaaccgctttattggctgttctaggagtggcgattggtcttgctttaacgggaattaccgtgctctttttaccagaagcgatgccttatgcaactaatggaccacgcatgattttgtttagtgtactattgattttatctgcattaattggcggggcattttcaattcgaacgattgctaaaattgatccgttaatcgcgattggaggttag

SEQ ID NO: 338 - protein, 359 aa, Enterococcus faecalis; identical to SEQ ID NO: 69

SEQ ID NO: 339 - DNA, 1080 bp, Enterococcus faecalis
atgtttttaggatttaatgaaatgaagtattcaaaaggacggtacgtccttgtagtcttagtaatggtcttgattgcttggttaatttttattttgtcaggtttagcgaacggtttagctcaaggaaatcgtttagccgtagatcaatggcaagcgaatcaagtggttttatcaaaagaggccaatagtaatttaaatgtatcagtgttagatgaaaacgtgaaagagacgatttcaggaggcaaaattgcaccgattggtcaacagtcgttagccatccgcccagcagatgataaaaaggctgaattaacgaatgttagcttatttgggattgaaaaagaaagttttttaatgccaaaagtgatcgaaggaaacgcatttactgataaaaatcaagtgattgcttcagaaacattgaaaaatcaaggatttaaaattggcgacaaattaactgcagggaaatatgatgagcaattagaaattgtcggctttatttctaaaagtagctataacattgtgccagttatttacacttctctggatacttggcggtcaattaaatatggtgacaatccagcaatggccaaaatggttaatggttttattgttcacagcaaggataacgcggaagttaaaacgactaataaagacagccaagttctttcaatttcagattttattgaaaaactgccaggatacagcgctcaaaacttgaccttggatggcatgatttatttcttgattgtgattgcagcgttcattatcggtatttttatctttgtgatgactttacagaaaacagcaatgttcggtgtcttaaaagttcaaggggtgccgactagtttcttagcaaaggcagtcatgctacaaaccgctttattggctgttctaggagtggcgattggtcttgctttaacgggaattaccgtgctctttttaccagaagcgatgccttatgcaactaatggaccacgcatgattttgtttagtgtactattgattttatctgcattaattggcggggcattttcaattcgaacgattgctaaaattgatccgttaatcgcgattggaggttag

SEQ ID NO: 340 - protein, 359 aa, Enterococcus faecalis
MFLGFNEMKYSKGRYVLVVLVMVLIAWLIFILSGLANGLAQGNRLAVDQWQANQVVLSKEANSNLNVSVLDENVKETISGGKIAPIGQQSLAIRPADDKKAELTNVSLFGIEKESFLMPKVIEGNAFTDKNQVIASETLKNQGFKIGDKLTAGKYDEQLEIVGFISKSSYNIVPVIYTSLDTWRSIKYGDNPAMAKMVNGFIVHSKDNAEVKTTNKDSQVLSISDFIEKLPGYSAQNLTLDGMIYFLIVIAAFIIGIFIFVMTLQKTAMFGVLKVQGVPTSFLAKAVMLQTALLAVLGVAIGLALTGITVLFLPEAMPYATNGPRMILFSVLLILSALIGGAFSIRTIAKIDPLIAIGG

SEQ ID NO: 341 - DNA, 1080 bp, Enterococcus faecalis; identical to SEQ ID NO: 271

SEQ ID NO: 342 - protein, 359 aa, Enterococcus faecalis; identical to SEQ ID NO: 272

SEQ ID NO: 343 - DNA, 1080 bp, Enterococcus faecalis; identical to SEQ ID NO: 271

SEQ ID NO: 344 - protein, 359 aa, Enterococcus faecalis; identical to SEQ ID NO: 272

SEQ ID NO: 345 - DNA, 1080 bp, Enterococcus faecalis
atgtttttaggatttaatgaaatgaagtattcaaaaggacggtacgtccttgtagtcttagtaatggtcttgattgcttggttaatttttattttgtcaggtttagcgaacggtttagctcaaggaaatcgtttagccgtagatcaatggcaagcgaatcaagtggttttatcaaaagaggccaatagtaatttaaatgtatcagtgttagatgaaaacgtgaaagagacgatttcaggaggcaaaattgcaccgattggtcagcagtctctagccatccgcccagcagatgataaaaaggctgaattaacgaatgttagcttatttgggattgaaaaagacagttttttaatgccaaaagtgattgaaggaaacgcatttactgataaaaatcaagtgattgcttcagaaacattgaaaaatcaaggatttaaaattggcgacaaattaacggctgggaaatatgatgagcaattagaaattgtcggctttatttctaaaagtagctataacattgtgccagttatttacacttctctggatacttggcggtcaattaaatatggtgacaatccagcaatggccaaaatggttaatggttttattgttcgcagcaaggacaatgcgaaagttaaaacgactaataaggatagccaagttctttcaatttcagattttattgaaaaactgccaggatacagcgctcaaaacttaaccttggatggcatgatttatttcttgattgtgattgcagcgttcattatcggtatttttatctttgtgatgactttacagaaaacagcaatgttcggtgtcttaaaagttcaaggggtaccgacaagtttcttagcaaaggcagttatgctacaaaccgctttattggctgttttaggagtggcaattggtcttgctttaacgggaattaccgtgctctttttaccagaagcaatgccttatgcaactaatggaccacgcatgattttgtttagtgtactattgattttatctgcattaattggcggagcattttcaattcgaacgattgctaaaattgatccgttaatcgcgattggaggttag

SEQ ID NO: 346 - protein, 359 aa, Enterococcus faecalis
MFLGFNEMKYSKGRYVLVVLVMVLIAWLIFILSGLANGLAQGNRLAVDQWQANQVVLSKEANSNLNVSVLDENVKETISGGKIAPIGQQSLAIRPADDKKAELTNVSLFGIEKDSFLMPKVIEGNAFTDKNQVIASETLKNQGFKIGDKLTAGKYDEQLEIVGFISKSSYNIVPVIYTSLDTWRSIKYGDNPAMAKMVNGFIVRSKDNAKVKTTNKDSQVLSISDFIEKLPGYSAQNLTLDGMIYFLIVIAAFIIGIFIFVMTLQKTAMFGVLKVQGVPTSFLAKAVMLQTALLAVLGVAIGLALTGITVLFLPEAMPYATNGPRMILFSVLLILSALIGGAFSIRTIAKIDPLIAIGG

SEQ ID NO: 347 - DNA, 1080 bp, Enterococcus faecalis; identical to SEQ ID NO: 281

SEQ ID NO: 348 - protein, 359 aa, Enterococcus faecalis; identical to SEQ ID NO: 272

SEQ ID NO: 349 - DNA, 1080 bp, Enterococcus faecalis; identical to SEQ ID NO: 271

SEQ ID NO: 350 - protein, 359 aa, Enterococcus faecalis; identical to SEQ ID NO: 272

SEQ ID NO: 351 - DNA, 1080 bp, Enterococcus faecalis; identical to SEQ ID NO: 49

SEQ ID NO: 352 - protein, 359 aa, Enterococcus faecalis; identical to SEQ ID NO: 69

SEQ ID NO: 353 - DNA, 1080 bp, Enterococcus faecalis; identical to SEQ ID NO: 49

SEQ ID NO: 354 - protein, 359 aa, Enterococcus faecalis; identical to SEQ ID NO: 69

SEQ ID NO: 355 - DNA, 1662 bp, Enterococcus faecalis
atgaagaaattaaaaatgttaggatgcgtcggtttgcttttagctttaacggcttgtcaggcgggaacgggaaactcggctgatagtaacaaagtagcggaacaaaaaattgcaattagttctgaagcggctatttcgacaatggaaccacacacagcgggggatacgacctcgactttagtcatgaatcaagtttatgaaggactctatgttttaggtaaagaagatgaattagagttgggggtcgctgccgaagaaccagcgatttctgaagatgaaaccgtttatacatttaagattagagaagatgccaaatggtcgaatgatgatccagtaacagcaaacgactttgtttatgcatggcaacaagttgcttcccctaaatcagggtcgattcatcaagctttattttttgatgtcattaaaaatgctaaggaaattgctttagaaggcgcagatgtgaatactcttggggttaaggcgctagatgataaaacgttagaaataactttagagcggcctaccccttatttgaaatctttgctttcgtttcctgttttgtttccgcaaaatgaaaaatatatcaaagaacaaggggataaatatgccactgatgcagaacatttgatttataatggttcttttaaattgaaagaatgggataatgcctcttccgatgactggacctacgaaaaaaatgatacgtattgggatgctgaaaaagttaaattaacagaagcgaaagtttcagtaattaagagcccaacgacagcggtgaatttgtttgactcgaatgaattggatgtagtgaataagctaagtggtgaacttattcctggttatgttgataatccagcctttctttcaattcctcaattcgtcacatactttttaaaaatgaacagcgttcgtgatggaaaagaaaatccggctttagcgaacaacaatattcgtaaagcgttggcacaagcttttgataaagaaagttttgtaaaagaagtcttgcaagatcaatcaacggctacagatcaagtaattcctccgggacaaacgattgcgccagatggaacagatttcacaaaactagctgctaagaaaaataactacttaacctacgatacagcgaaagcaaaagaattctgggaaaaagggaaaaaagaaattgggctggataaaatcaaattagaatttttaacagatgatacagacagcgccaaaaaagctgctgagtttttccaatttcaattggaagaaaatctagatggattagaagtgaatgttactcaagttccttttactattcgtgttgatcgtgatcaaacgagagactatgatttagaattatctggttggggaaccgattatcgtgatccattaacagttatgcgcatctttacttcggatagtaccttgggcggcgtaacgttcaagagtgatacgtatgatcaattaattcaagaaactagaacaacacatgcggctgatcaagaggctcgtttaaatgactttgctcaagcacaagatattttggtgaatcaggaaacggttttagcaccaatctacaatcgaagcatttctgtattagctaatcaaaaaatcaaggatctgtattggcattcatttggacctacgtacagtttaaaatgggcttatgttaactaa

SEQ ID NO: 356 - protein, 553 aa, Enterococcus faecalis
MKKLKMLGCVGLLLALTACQAGTGNSADSNKVAEQKIAISSEAAISTMEPHTAGDTTSTLVMNQVYEGLYVLGKEDELELGVAAEEPAISEDETVYTFKIREDAKWSNDDPVTANDFVYAWQQVASPKSGSIHQALFFDVIKNAKEIALEGADVNTLGVKALDDKTLEITLERPTPYLKSLLSFPVLFPQNEKYIKEQGDKYATDAEHLIYNGSFKLKEWDNASSDDWTYEKNDTYWDAEKVKLTEAKVSVIKSPTTAVNLFDSNELDVVNKLSGELIPGYVDNPAFLSIPQFVTYFLKMNSVRDGKENPALANNNIRKALAQAFDKESFVKEVLQDQSTATDQVIPPGQTIAPDGTDFTKLAAKKNNYLTYDTAKAKEFWEKGKKEIGLDKIKLEFLTDDTDSAKKAAEFFQFQLEENLDGLEVNVTQVPFTIRVDRDQTRDYDLELSGWGTDYRDPLTVMRIFTSDSTLGGVTFKSDTYDQLIQETRTTHAADQEARLNDFAQAQDILVNQETVLAPIYNRSISVLANQKIKDLYWHSFGPTYSLKWAYVN

SEQ ID NO: 357 - DNA, 828 bp, Enterococcus faecalis
atgaaaaaattaaaaatgttaggatgcgtcggtttgcttttagctttaacggcttgtcaggcgggaacgggaaactcggctgatagtaacaaagcagcggaacaaaaaattgcaattagttctgaagcggctatttcgacaatggaaccacacacagcgggggatacgacctcgactttagtcatgaatcaagtttatgaaggactctatgttttaggtaaagaagatgaattagagttgggggtcgctgccgaagaaccagcaatttctgaagatgaaaccgtttatacatttaagattagagaagatgccaaatggtcgaatgatgatccagtaacagcaaatgactttgtttatgcatggcaacaagttgcttcccctaaatcaggatcgattcatcaagcgttattttttgatgtcattaaaaatgctaaggaaattgctttagaaggcgcagatgtgaatactcttggggttaaggcgctagatgataaaacgttagaaataactttagaacggcccaccccttattttaaatcattactttcgtttcctgttttgtttccacaaaatgaaaaatatatcaaagaacaaggggataaatatgccactgatgcagaacatttgatttataatggtccttttaaattgaaagaatgggataatgcctcttctgatgactggacctacgaaaaaaatgatacgtattgggatgctgaaaaagttaaattatcagaagcaaaagtttcagtaattaagagcccaacgacagcggtgaatttgtttgactcgaatgaattggatgtagtgaataagctaagtggtgaa

SEQ ID NO: 358 - protein, 276 aa, Enterococcus faecalis
MKKLKMLGCVGLLLALTACQAGTGNSADSNKAAEQKIAISSEAAISTMEPHTAGDTTSTLVMNQVYEGLYVLGKEDELELGVAAEEPAISEDETVYTFKIREDAKWSNDDPVTANDFVYAWQQVASPKSGSIHQALFFDVIKNAKEIALEGADVNTLGVKALDDKTLEITLERPTPYFKSLLSFPVLFPQNEKYIKEQGDKYATDAEHLIYNGPFKLKEWDNASSDDWTYEKNDTYWDAEKVKLSEAKVSVIKSPTTAVNLFDSNELDVVNKLSGE

SEQ ID NO: 359 - DNA, 1662 bp, Enterococcus faecalis
atgaagaaattaaaaatgttaggatgcgtcggtttgcttttagctttaacggcttgtcaggcgggaacgggaaactcggctgatagtaacaaagcagcggaacaaaaaattgcaattagttctgaagcggctatttcgacaatggaaccacacacagcgggggatacgacctcgactttagtcatgaatcaagtttatgaaggactctatgttttaggtaaagaagatgaattagagttgggggtcgctgccgaagaaccagcgatttctaaatatgaaaccgtttatacatttaagattagagaagatgccaaatggtcgaatgatgatccagtaacagcaaacgactttgtttatgcatggcaacaagttgcttcccctaaatcaggatcgattcatcaagcgttattttttgatgtcattaaaaatgctaaggaaattgctttagaaggcgcagatgtgaatactcttggggttaaggcgctagatgataaaacgttagaaataactttagagcggcccaccccttatttgaaatcattgctttcgtttcctgttttgtttccacaaaatgaaaaatatatcaaagaacaaggggataaatatgccactgatgcagaacatttgatttataatggtccttttaaattgaaagaatgggataatgcctcttccgatgactggacctacgaaaaaaatgatacgtattgggatgctgaaaaagttaaattaacagaagcgaaagtttcagtaattaagagcccaacgacagcggtgaatttgtttgactcgaatgaattggatgtagtgaataagctaagtggtgaatttattcctggttatgttgataatccagcctttctttcaattcctcaattcgtcacatactttttaaaaatgaacagcgttcgtgatggaaaagaaaatccggctttagcgaacaacaatattcgtaaagcgttggcacaagcttttgataaagaaagttttgtaaaagaagtcttgcaagatcaatcaacggctacagatcaagtaattccgccgggacaaacgattgcgccagatggaacagatttcacaaaactagctgctaagaaaaataactacttaacctacgatacagcgaaagcaaaagaattctgggaaaaagggaaaaaagaaattgggctggataaaatcaaattagaatttttaacagatgatacagacagcgccaaaaaagctgctgagtttttccaatttcaattggaagaaaatctagacggattagaagtgaatgttactcaagttccttttactattcgtgttgatcgtgatcaaacgagagactatgatttagaattatctggttggggaaccgattatcgtgatccattaacagttatgcgcatctttacttcggatagtaccttgggcggcgtaacgttcaagagtgatacgtatgatcaattaattcaagaaactagaacaacacatgcggctgatcaagaggctcgtttaaatgactttgctcaagcacaagatattttggtgaatcaggaaacggttttagcaccaatctacaatcgaagcatttctgtattagctaatcaaaaaatcaaggatctgtattggcattcatttggacccacgtacagtttaaaatgggcttatgttaactaa

SEQ ID NO: 360 - protein, 553 aa, Enterococcus faecalis
MKKLKMLGCVGLLLALTACQAGTGNSADSNKAAEQKIAISSEAAISTMEPHTAGDTTSTLVMNQVYEGLYVLGKEDELELGVAAEEPAISKYETVYTFKIREDAKWSNDDPVTANDFVYAWQQVASPKSGSIHQALFFDVIKNAKEIALEGADVNTLGVKALDDKTLEITLERPTPYLKSLLSFPVLFPQNEKYIKEQGDKYATDAEHLIYNGPFKLKEWDNASSDDWTYEKNDTYWDAEKVKLTEAKVSVIKSPTTAVNLFDSNELDVVNKLSGEFIPGYVDNPAFLSIPQFVTYFLKMNSVRDGKENPALANNNIRKALAQAFDKESFVKEVLQDQSTATDQVIPPGQTIAPDGTDFTKLAAKKNNYLTYDTAKAKEFWEKGKKEIGLDKIKLEFLTDDTDSAKKAAEFFQFQLEENLDGLEVNVTQVPFTIRVDRDQTRDYDLELSGWGTDYRDPLTVMRIFTSDSTLGGVTFKSDTYDQLIQETRTTHAADQEARLNDFAQAQDILVNQETVLAPIYNRSISVLANQKIKDLYWHSFGPTYSLKWAYVN

SEQ ID NO: 361 - DNA, 1662 bp, Enterococcus faecalis
atgaagaaattaaaaatgttaggatgcgtcggtttgcttttagctttaacggcttgtcaggcgggaacgggaaactcggctgatagtaacaaagcagcggaacaaaaaattgcaattagttctgaagcggctatttcgacaatggaaccacacacagcgggggatacgacctcgactttagtcataaatcaagtttatgaaggactctatgttttaggtaaagaagatgaattagagttgggggtcgctgccgaagaaccagcgatttctgaagatgaaaccgtttatacatttaagattagagaagatgccaaatggtcgaatgatgatccagtaacagcaaacgactttgtttatgcatggcaacaagttgcttcccctaaatcaggatcgattcatcaagctttattttttgatgtcattaaaaatgctaaggaaattgctttagaaggcgcagatgtgaatactcttggggttaaggcgctagatgataaaacgttagaaataactttagaacggcccaccccttatttgaaatctttgctttcgtttcctgttttgtttccgcaaaatgaaaaatatatcaaagaacaaggggataaatatgccactgatgcagaacatttgatttataatggtccttttaaattgaaagaatgggataatgcctcttccgatgactggacctacgaaaaaaatgatacgtattgggatgctgaaaaagttaaattaacagaagcgaaagtttcagtaattaagagcccaacgacagcggtgaatttgtttgactcgaatgaattggatgtagtgaataagctaagtggtgaatttattcctggttatgttgataatccagcctttctttcaattcctcaattcgtcacatactttttaaaaatgaacagcgttcgtgatggaaaagaaaatccggctttagcgaacaacaatattcgtaaagcgttggcacaagcttttgataaagaaagttttgtaaaagaagtcttgcaagatcaatcaacggctacagatcaagtaattcctccgggacaaacgattgcgccagatggaacagatttcacaaaactagctgctaagaaaaataactacttaacctacgatacagcgaaagcaaaagaattctgggaaaaagggaaaaaagaaattgggctggataaaatcaaattagaatttttaacagatgatacagacagcgccaaaaaagctgctgagtttttccaatttcaattggaagaaaatctagatggattagaagtgaatgttactcaagttccttttactattcgtgttgatcgtgatcaaacgagagactatgatttagaattatctggttggggaaccgattatcgtgatccattaacagttatgcgcatctttacttcggatagtaccttgggcggcgtaacgttcaagagtgatacgtatgatcaattaattcaagaaactagaacaacacatgcggctgatcaagaggctcgtttaaatgactttgctcaagcacaagatattttggtgaatcaggaaacggttttagcaccaatctacaatcgaagcatttctgtattagctaatcaaaaaatcaaggatctgtattggcattcatttggacctacgtacagtttaaaatgggcttatgttaactaa

SEQ ID NO: 362 - protein, 553 aa, Enterococcus faecalis
MKKLKMLGCVGLLLALTACQAGTGNSADSNKAAEQKIAISSEAAISTMEPHTAGDTTSTLVINQVYEGLYVLGKEDELELGVAAEEPAISEDETVYTFKIREDAKWSNDDPVTANDFVYAWQQVASPKSGSIHQALFFDVIKNAKEIALEGADVNTLGVKALDDKTLEITLERPTPYLKSLLSFPVLFPQNEKYIKEQGDKYATDAEHLIYNGPFKLKEWDNASSDDWTYEKNDTYWDAEKVKLTEAKVSVIKSPTTAVNLFDSNELDVVNKLSGEFIPGYVDNPAFLSIPQFVTYFLKMNSVRDGKENPALANNNIRKALAQAFDKESFVKEVLQDQSTATDQVIPPGQTIAPDGTDFTKLAAKKNNYLTYDTAKAKEFWEKGKKEIGLDKIKLEFLTDDTDSAKKAAEFFQFQLEENLDGLEVNVTQVPFTIRVDRDQTRDYDLELSGWGTDYRDPLTVMRIFTSDSTLGGVTFKSDTYDQLIQETRTTHAADQEARLNDFAQAQDILVNQETVLAPIYNRSISVLANQKIKDLYWHSFGPTYSLKWAYVN

SEQ ID NO: 363 - DNA, 1662 bp, Enterococcus faecalis
atgaagaaattaaaaatgttaggatgcgtcggtttgcttttagctttaacggcttgtcaggcgggaacgggaaactcggctgatagtaacaaagcagcggaacaaaaaattgcaattagttctgaagcggctatttcgacaatggaaccacacacagcgggggatacgacctcgactttagtcatgaatcaagtttatgaaggactctatgttttaggtaaagaagatgaattagagttgggggtcgctgccgaagaaccagcgatttctgaagatgaaaccgtttatacatttaagattagagaagatgccaaatggtcgaatgatgatccagtaacagcaaacgactttgtttatgcatggcaacaagttgcttcccctaaatcaggatcgattcatcaagctttattttttgatgtcattaaaaatgctaaggaaattgctttagaaggcgcagatgtgaatactcttggggttaaggcgctagatgataaaacgttagaaataactttagagcggcctaccccttatttgaaatctttgctttcgtttcctgttttgtttccgcaaaatgaaaaatatatcaaagaacaaggggataaatatgccactgatgcagaacatttgatttataatggttcttttaaattgaaagaatgggataatgcctcttccgatgactggacctacgaaaaaaatgatacgtattgggatgctgaaaaagttaaattaacagaagcgaaagtttcagtaattaagagcccaacgacagcggtgaatttgtttgactcgaatgaattggatgtagtgaataagctaagtggtgaatttattcctggttatgttgataatccagcctttctttcaattcctcaattcgtcacatactttttaaaaatgaacagcgttcgtgatggaaaagaaaatccggctttagcgaacaacaatattcgtaaagcgttggcacaagcttttgataaagaaagttttgtaaaagaagtcttgcaagatcaatcaacggctacagatcaagtaattccgccgggacaaacgattgcgccagatggaacagatttcacaaaactagctgctaagaaaaataactacttaacctacgatacagcgaaagcaaaagaattctgggaaaaagggaaaaaagaaattgggctggataaaatcaaattagaatttttaacagatgatacagacagcgccaaaaaagctgctgagtttttccaatttcaattggaagaaaatctagacggattagaagtgaatgttactcaagttccttttactattcgtgttgatcgtgatcaaacgagagactatgatttagaattatctggttggggaaccgattatcgtgatccattaacagttatgcgcatctttacttcggatagtaccttgggcggcgtaacgttcaagagtgatacgtatgatcaattaatccaagagactagaacaacacatgcggctgatcaagaggctcgtttaaatgactttgctcaagcacaagatattttggtgaatcaggaaacggttttagcaccaatctacaatcgaagcatttctgtattagctaatcaaaaaatcaaggatctgtattggcattcatttggacctacgtacagtttaaaatgggcttatgttaactaa

SEQ ID NO: 364 - protein, 553 aa, Enterococcus faecalis
MKKLKMLGCVGLLLALTACQAGTGNSADSNKAAEQKIAISSEAAISTMEPHTAGDTTSTLVMNQVYEGLYVLGKEDELELGVAAEEPAISEDETVYTFKIREDAKWSNDDPVTANDFVYAWQQVASPKSGSIHQALFFDVIKNAKEIALEGADVNTLGVKALDDKTLEITLERPTPYLKSLLSFPVLFPQNEKYIKEQGDKYATDAEHLIYNGSFKLKEWDNASSDDWTYEKNDTYWDAEKVKLTEAKVSVIKSPTTAVNLFDSNELDVVNKLSGEFIPGYVDNPAFLSIPQFVTYFLKMNSVRDGKENPALANNNIRKALAQAFDKESFVKEVLQDQSTATDQVIPPGQTIAPDGTDFTKLAAKKNNYLTYDTAKAKEFWEKGKKEIGLDKIKLEFLTDDTDSAKKAAEFFQFQLEENLDGLEVNVTQVPFTIRVDRDQTRDYDLELSGWGTDYRDPLTVMRIFTSDSTLGGVTFKSDTYDQLIQETRTTHAADQEARLNDFAQAQDILVNQETVLAPIYNRSISVLANQKIKDLYWHSFGPTYSLKWAYVN

SEQ ID NO: 365 - DNA, 1662 bp, Enterococcus faecalis
atgaagaaattaaaaatgttaggatgcgtcggtttgcttttagctttaacggcttgtcaggcgggaacgggaaactcggctgatagtaacaaagcagcggaacaaaaaattgcaattagttctgaagcggctatttcgacaatggaaccacacacagcgggggatacgacctcgactttagtcatgaatcaagtttatgaaggactctatgttttaggtaaagaagatgaattagagttgggggtcgctgccgaagaaccagcgatttctgaagatgaaaccgtttatacatttaagattagagaagatgccaaatggtcgaatgatgatccagtaacagcaaacgactttgtttatgcatggcaacaagttgcttcccctaaatcaggatcgattcatcaagctttattttttgatgtcattaaaaatgctaaggaaattgctttagaaggcgcagatgtgaatactcttggggttaaggcgctagatgataaaacgttagaaataactttagagcggcctaccccttatttgaaatcattgctttcgtttcctgttttgtttccacaaaatgaaaaatatatcaaagaacaaggggataaatatgtccctgatgcagaacatttgatttataatggtccttttaaattgaaagaatgggataatgcctcttccgatgactggacctacgaaaaaaatgatacgtattgggatgctgaaaaagttaaattaacagaagcgaaagtttcagtaattaagagcccaacgacagcggtgaatttgtttgactcgaatgaattggatgtagtgaataagctaagtggtgaatttattcctggttatgttgataatccagcctttctttcaattcctcaattcgtcacatactttttaaaaatgaacagtgttcgtgatggaaaagaaaatccggctttagcgaacaacaatattcgtaaagcgttggcacaagcttttgataaagaaagttttgtaaaagaagtcttgcaagatcaatcaacggctacagatcaagtaattccgccgggacaaacgattgcgccagatggaacggatttcacaaaactagctgctaagaaaaataactacttaacctacgatacagcgaaagcaaaagaattctgggaaaaagggaaaaaagaaattgggatggataaaatcaaattagaatttttaacagatgatacagacagcgccaaaaaagctgctgagtttttccaatttcaattggaagaaaatctagacggattagaagtgaatgttactcaagttccttttactattcgtgttgatcgtgatcaaacgagagactatgatttagaattatctggttggggaaccgattatcgtgatccattaacagttatgcgcatctttacttcggatagtaccttgggcggcgtaacgttcaagagtgatacgtatgatcaattaatccaagagactagaacaatacatgcggctgatcaagaggctcgtttaaatgactttgctcaagcacaagatattttggtgaatcaggaaacggttttagcaccaatctacaatcgaagcatttctgtattagctaatcaaaaaatcaagaatctgtattggcattcatttggacctacgtacagtttaaaatgggcttatgttaactaa

SEQ ID NO: 366 - protein, 553 aa, Enterococcus faecalis
MKKLKMLGCVGLLLALTACQAGTGNSADSNKAAEQKIAISSEAAISTMEPHTAGDTTSTLVMNQVYEGLYVLGKEDELELGVAAEEPAISEDETVYTFKIREDAKWSNDDPVTANDFVYAWQQVASPKSGSIHQALFFDVIKNAKEIALEGADVNTLGVKALDDKTLEITLERPTPYLKSLLSFPVLFPQNEKYIKEQGDKYVPDAEHLIYNGPFKLKEWDNASSDDWTYEKNDTYWDAEKVKLTEAKVSVIKSPTTAVNLFDSNELDVVNKLSGEFIPGYVDNPAFLSIPQFVTYFLKMNSVRDGKENPALANNNIRKALAQAFDKESFVKEVLQDQSTATDQVIPPGQTIAPDGTDFTKLAAKKNNYLTYDTAKAKEFWEKGKKEIGMDKIKLEFLTDDTDSAKKAAEFFQFQLEENLDGLEVNVTQVPFTIRVDRDQTRDYDLELSGWGTDYRDPLTVMRIFTSDSTLGGVTFKSDTYDQLIQETRTIHAADQEARLNDFAQAQDILVNQETVLAPIYNRSISVLANQKIKNLYWHSFGPTYSLKWAYVN

SEQ ID NO: 367 - DNA, 1662 bp, Enterococcus faecalis
atgaagaaattaaaaatgttaggatgcgtcggtttgcttttagctttaacggcttgtcaggcgggaacgggaaactcggctgatagtaacaaagcagcggaacaaaaaattgcaattagttctgaagcggctatttcgacaatggaaccacacacagcgggggatacgacctcgactttagtcatgaatcaagtttatgaaggactctatgttttaggtaaagaagatgaattagagttgggggtcgctgccgaagaaccagcgatttctgaagatgaaaccgtttatacatttaagattagagaagatgccaaatggtcgaatgatgatccagtaacagcaaacgactttgtttatgcatggcaacaagttgcttcccctaaatcaggatcgattcatcaagctttattttttgatgtcattaaaaatgctaaggaaattgctttagaaggcgcagatgtgaatactcttggggttaagtcgctagatgataaaacgttagaaataactttagaacggcccaccccttatttgaaatctttgctttcgtttcctgttttgtttccgcaaaatgaaaaatatatcaaagaacaaggggataaatatgccactgatgcagaacatttgatttataatggtccttttaaattgaaagaatgggataatgcctcttccgatgactggacctacgaaaaaaatgatacgtattgggatgctgaaaaagttaaattaacagaagcgaaagtttcagtaattaaaagcccaacgacagcggtgaatttgtttgactcgaatgaattggatgtagtgaataagctaagtggtgaatttattcctggttatgttgataatccagcctttctttcaattcctcaattcgtcacatactttttaaaaatgaacagtgttcgtgatggaaaagaaaatccggctttagcgaacaacaatattcgtaaagcgttggcacaagcttttgataaagaaagttttgtaaaagaagtcttgcaagatcaatccacggctacagatcaagtaattccgccgggacaaacgattgcgccagatggaacagatttcacaaaactagctgctaagaaaaataactacttaacctacgatacagcgaaagcaaaagaattctgggaaaaagggaaaaaagaaattgggctggataaaatcaaattagaatttttaacagatgatacagacagcgccaaaaaagctgctgagtttttccaatttcaattggaagaaaatctagatggattagaagtgaatgttactcaagttccttttactattcgtgttgatcgtgatcaaacgagagactatgatttagaattatctggttggggaaccgattatcgtgatccattaacagttatgcgcatctttacttcggatagtaccttgggcggcgtaacgttcaagagtgatacgtatgatcaattaatccaagagactagaacaacacatgcggctgatcaagaggctcgtttaaatgactttgctcaagcacaagatattttggtgaatcaggaaacggttttagcaccaatctacaatcgaagcatttctgtattagctaatcaaaaaatcaaggatctgtattggcattcatttggacctacgtacagtttaaaatgggcttatgttaactaa

SEQ ID NO: 368 - protein, 553 aa, Enterococcus faecalis
MKKLKMLGCVGLLLALTACQAGTGNSADSNKAAEQKIAISSEAAISTMEPHTAGDTTSTLVMNQVYEGLYVLGKEDELELGVAAEEPAISEDETVYTFKIREDAKWSNDDPVTANDFVYAWQQVASPKSGSIHQALFFDVIKNAKEIALEGADVNTLGVKSLDDKTLEITLERPTPYLKSLLSFPVLFPQNEKYIKEQGDKYATDAEHLIYNGPFKLKEWDNASSDDWTYEKNDTYWDAEKVKLTEAKVSVIKSPTTAVNLFDSNELDVVNKLSGEFIPGYVDNPAFLSIPQFVTYFLKMNSVRDGKENPALANNNIRKALAQAFDKESFVKEVLQDQSTATDQVIPPGQTIAPDGTDFTKLAAKKNNYLTYDTAKAKEFWEKGKKEIGLDKIKLEFLTDDTDSAKKAAEFFQFQLEENLDGLEVNVTQVPFTIRVDRDQTRDYDLELSGWGTDYRDPLTVMRIFTSDSTLGGVTFKSDTYDQLIQETRTTHAADQEARLNDFAQAQDILVNQETVLAPIYNRSISVLANQKIKDLYWHSFGPTYSLKWAYVN

SEQ ID NO: 369 - DNA, 1662 bp, Enterococcus faecalis
atgaagaaattaaaaatgttaggatgcgtcggtttgcttttagctttaacggcttgtcaggcgggaacgggaaactcggctgatagtaacaaagcagcggaacaaaaaattgcaattagttctgaagcggctatttcgacaatggaaccacacacagcgggggatacgacctcgactttagtcatgaatcaagtttatgaaggactctatgttttaggtaaagaagatgaattagagttgggggtcgctgccgaagaaccagcgatttctgaagatgaaaccgtttatacatttaagattagagaagatgccaaatggtcgaatgatgatccagtaacagcaaacgactttgtttatgcatggcaacaagttgcttcccctaaatcaggatcgattcatcaagctttattttttgatgtcattaaaaatgctaaggaaattgctttagaaggcgcagatgtgaatactcttggggttaagtcgctagatgataaaacgttagaaataactttagaacggcccaccccttatttgaaatctttgctttcgtttcctgttttgtttccgcaaaatgaaaaatatatcaaagaacaaggggataaatatgccactgatgcagaacatttgatttataatggtccttttaaattgaaagaatgggataatgccttttccgatgactggacctacgaaaaaaatgatacgtattgggatgctgaaaaagttaaattaacagaagcgaaagtttcagtaattaaaagcccaacgacagcggtgaatttgtttgactcgaatgaattggatgtagtgaataagctaagtggtgaatttattcctggttatgttgataatccagcctttctttcaattcctcaattcgtcacatactttttaaaaatgaacagtgttcgtgatggaaaagaaaatccggctttagcgaacaacaatattcgtaaagcgttggcacaagcttttgataaagaaagttttgtaaaagaagtcttgcaagatcaatccacggctacagatcaagtaattccgccgggacaaacgattgcgccagatggaacagatttcacaaaactagctgctaagaaaaataactacttaacctacgatacagcgaaagcaaaagaattctgggaaaaagggaaaaaagaaattgggctggataaaatcaaattagaatttttaacagatgatacagacagcgccaaaaaagctgctgagtttttccaatttcaattggaagaaaatctagatggattagaagtgaatgttactcaagttccttttactattcgtgttgatcgtgatcaaacgagagactatgatttagaattatctggttggggaaccgattatcgtgatccattaacagttatgcgcatctttacttcggatagtaccttgggcggcgtaacgttcaagagtgatacgtatgatcaattaatccaagagactagaacaacacatgcggctgatcaagaggctcgtttaaatgactttgctcaagcacaagatattttggtgaatcaggaaacggttttagcaccaatctacaatcgaagcatttctgtattagctaatcaaaaaatcaaggatctgtattggcattcatttggacctacgtacagtttaaaatgggcttatgttaactaa

SEQ ID NO: 370 - protein, 553 aa, Enterococcus faecalis
MKKLKMLGCVGLLLALTACQAGTGNSADSNKAAEQKIAISSEAAISTMEPHTAGDTTSTLVMNQVYEGLYVLGKEDELELGVAAEEPAISEDETVYTFKIREDAKWSNDDPVTANDFVYAWQQVASPKSGSIHQALFFDVIKNAKEIALEGADVNTLGVKSLDDKTLEITLERPTPYLKSLLSFPVLFPQNEKYIKEQGDKYATDAEHLIYNGPFKLKEWDNAFSDDWTYEKNDTYWDAEKVKLTEAKVSVIKSPTTAVNLFDSNELDVVNKLSGEFIPGYVDNPAFLSIPQFVTYFLKMNSVRDGKENPALANNNIRKALAQAFDKESFVKEVLQDQSTATDQVIPPGQTIAPDGTDFTKLAAKKNNYLTYDTAKAKEFWEKGKKEIGLDKIKLEFLTDDTDSAKKAAEFFQFQLEENLDGLEVNVTQVPFTIRVDRDQTRDYDLELSGWGTDYRDPLTVMRIFTSDSTLGGVTFKSDTYDQLIQETRTTHAADQEARLNDFAQAQDILVNQETVLAPIYNRSISVLANQKIKDLYWHSFGPTYSLKWAYVN

SEQ ID NO: 371 - DNA, 1662 bp, Enterococcus faecalis
atgaaaaaattaaaaatgttaggatgcgtcggtttgcttttagctttaacggcttgtcaggcgggaacgggaaactcggctgatagtaacaaagcagcggaacaaaaaattgcaattagttctgaagcggctatttcgacaatggaaccacacacagcgggggatacgacctcgactttagtcatgaatcaagtttatgaaggactctatgttttaggtaaagaagatgaattagagttgggggtcgctgccgaagaaccagcgatttctgaagatgaaaccgtttatacatttaagattagagaagatgccaaatggtcgaatgatgatccagtaacagcaaacgactttgtttatgcatggcaacaagttgtttcccctaaatcaggatcgattcatcaagctttattttttgatgtcattaaaaatgctaaggaaattgctttagaaggcgcagatgtgaatactcttggggttaaggcgctagatgataaaacgttagaaataactttagagcggcctaccccttatttgaaatcattgctttcgtttcctgttttgtttccacaaaatgaaaaatatatcaaagaacaaggggataaatatgccactgatgcagaacatttgatttataatggtccttttaaattgaaagaatgggataatgcctcttccgatgactggacctacgaaaaaaatgatacgtattgggatgctgaaaaagttaaattaacagaagcgaaagtttcagtaattaagagcccaacgacagcggtgaatttgtttgactcgaatgaattggatgtagtgaataagctaagtggtgaatttattcctggttatgttgataatccagcctttctttcaattcctcaattcgtcacatactttttaaaaatgaacagtgttcgtgatggaaaagaaaatccggctttagcgaacaacaatattcgtaaagcgttggcacaagcttttgataaagaaagttttgtaaaagaagtcttgcaagatcaatccacggctacagatcaagtaattccgccggggcaaacgattgcgccagatggaacagatttcacaaaactagctgctaagaaaaataactacttaacctacgatacagcgaaagcaaaagaattctgggaaaaagggaaaaaagaaattgggctggataaaatcaaattagaatttttaacagatgatacagacagcgccaaaaaagctgctgagtttttccaatttcaattggaagaaaatctagatggattagaagtgaatgttactcaagttccttttactattcgtgttgatcgtgatcaaacgagagactatgatttagaattatctggttggggaaccgattatcgtgatccattaacagttatgcgcatctttacttcggatagtaccttgggcggcgtaacgttcaagagtgatacgtatgatcaattaattcaagaaactagaacaacacatgcggctgatcaagaggctcgtttaaatgactttgctcaagcacaagatattttggtgaatcaggaaacggttttagcaccaatctacaatcgaagcatttctgtattagctaatcaaaaaatcaaggatctgtattggcattcatttggacctacgtacagtttaaaatgggcttatgttaactaa

SEQ ID NO: 372 - protein, 553 aa, Enterococcus faecalis
MKKLKMLGCVGLLLALTACQAGTGNSADSNKAAEQKIAISSEAAISTMEPHTAGDTTSTLVMNQVYEGLYVLGKEDELELGVAAEEPAISEDETVYTFKIREDAKWSNDDPVTANDFVYAWQQVVSPKSGSIHQALFFDVIKNAKEIALEGADVNTLGVKALDDKTLEITLERPTPYLKSLLSFPVLFPQNEKYIKEQGDKYATDAEHLIYNGPFKLKEWDNASSDDWTYEKNDTYWDAEKVKLTEAKVSVIKSPTTAVNLFDSNELDVVNKLSGEFIPGYVDNPAFLSIPQFVTYFLKMNSVRDGKENPALANNNIRKALAQAFDKESFVKEVLQDQSTATDQVIPPGQTIAPDGTDFTKLAAKKNNYLTYDTAKAKEFWEKGKKEIGLDKIKLEFLTDDTDSAKKAAEFFQFQLEENLDGLEVNVTQVPFTIRVDRDQTRDYDLELSGWGTDYRDPLTVMRIFTSDSTLGGVTFKSDTYDQLIQETRTTHAADQEARLNDFAQAQDILVNQETVLAPIYNRSISVLANQKIKDLYWHSFGPTYSLKWAYVN

SEQ ID NO: 373 - DNA, 1662 bp, Enterococcus faecalis
atgaagaaattaaaaatgttaggatgcgtcggtttgcttttagctttaacggcttgtcaggcgggaacgggaaactcggctgatagtaacaaagcagcggaacaaaaaattgcaattagttctgaagcggctatttcgacaatggaaccacacacagcgggggatacgacctcgactttagtcatgaatcaagtttatgaaggactctatgttttaggtaaagaagatgaattagagttgggggtcgctgccgaagaaccagcgatttctgaagatgaaaccgtttatacatttaagattagagaagatgccaaatggtcgaatgatgatccagtaacagcaaacgactttgtttatgcatggcaacaagttgcttcccctaaatcagggtcgattcatcaagctttattttttgatgtcattaaaaatgctaaggaaattgctttagaaggcgcagatgtgaatactcttggggttaaggcgctagatgataaaacgttagaaataactttagagcggcctaccccttatttgaaatctttgctttcgtttcctgttttgtttccgcaaaatgaaaaatatatcaaagaacaaggggataaatatgccactgatgcagaacatttgatttataatggttcttttaaattgaaagaatgggataatgcctcttctgatgactggacctacgaaaaaaatgatacgtattgggatgctgaaaaagttaaattaacagaagcgaaagtttcagtaattaagagcccaacgacagcggtgaatttgtttgactcgaatgaattggatgtagtgaataagctaagtggtgaatttattcctggttatgttgataatccagcctttctttcaattcctcaattcgtcacatactttttaaaaatgaacagcgttcgtgatggaaaagaaaatccggctttagcgaacaacaatattcgtaaagcgttggcacaagcttttgataaagaaagttttgtaaaagaagtcttgcaagatcaatcaacggctacagatcaagtaattcctccgggacaaacgattgcgccagatggaacagatttcacaaaactagctgctaagaaaaataactacttaacctacgatacagcgaaagcaaaagaattctgggaaaaagggaaaaaagaaattgggctggataaaatcaaattagaatttttaacagatgatacagacagcgccaaaaaagctgctgagtttttccaatttcaattggaagaaaatctagatggattagaagtgaatgttactcaagttccttttactattcgtgttgatcgtgatcaaacgagagactatgatttagaattatctggttggggaaccgattatcgtgatccattaacagttatgcgcatctttacttcggatagtaccttgggcggcgtaacgttcaagagtgatacgtatgatcaattaattcaagaaactagaacaacacatgcggctgatcaagaggctcgtttaaatgactttgctcaagcacaagatattttggtgaatcaggaaacggttttagcaccaatctacaatcgaagcatttctgtattagctaatcaaaaaatcaaggatctgtattggcattcatttggacctacgtacagtttaaaatgggcttatgttaactaa

SEQ ID NO: 374 - protein, 553 aa, Enterococcus faecalis; identical to SEQ ID NO: 364

SEQ ID NO: 375 - DNA, 1662 bp, Enterococcus faecalis; identical to SEQ ID NO: 52

SEQ ID NO: 376 - protein, 553 aa, Enterococcus faecalis; identical to SEQ ID NO: 72

SEQ ID NO: 377 - DNA, 1662 bp, Enterococcus faecalis
atgaagaaattaaaaatgttaggatgcgtcggtttgcttttagctttaacggcttgtcaggcgggaacgggaaactcggctgatagtaataaagcagcggaacaaaaaattgcaattagttctgaagcggctatttcgacaatggaaccacacacagcgggggatacgacctcgactttagtcatgaatcaagtttatgagggactctatgttttaggtaaagaagatgaattagagttgggggtcgctgccgaagaaccagcgatttctgaagatgaaaccgtttatacatttaagattagagaagatgccaaatggtcgaatgatgatccagtaacagcaaacgactttgtttatgcatggcaacaagttgcttcccctaaatcagggtcgattcatcaagcgttattttttgatgtcattaaaaatgctaaggaaattgctttagaaggcgcagatgtgaatactcttggggttaaggcgctagatgataaaacgttagaaataactttagaacggcccaccccttatttgaaatcattactttcgtttcctgttttgtttccacaaaatgaaaaatatatcaaagaacaaggggataaatatgccactgatgcagaacatttgatttataatggtccttttaaattgaaagaatgggataatgcctcttctgatgactggacctacgaaaaaaatgatacgtattgggatgctgaaaaagttaaattaacagaagcaaaagtttcagtaattaagagcccaacgacagcggtgaatttgtttgactcgaatgaattggatgtagtgaataagctaagtggtgaatttattcctggttatgttgataatccagcctttctttcaattcctcaattcgtcacatactttttaaaaatgaacagtgttcgtgatggaaaagaaaatccggctttagcgaacaacaatattcgtaaagcgttggcacaagcttttgataaagaaagttttgtaaaagaagtcttgcaagatcaatcaacggctacagatcaagtaattccaccgggacaaacgattgcgccagatggaacagatttcacaaaactagctgctaagaaaaataactacttaacctacgatacagcgaaagcaaaagaattctgggaaaaagggaaaaaagaaattgggctggataaaatcaaattagaatttttaacagatgatacagacagcgccaaaaaagctgctgagtttttccaatttcaattggaagaaaatctagacggattagaagtgaatgttactcaagtaccttttactattcgtgttgatcgtgatcaaacgagagactatgatttagaattatctggttggggaaccgattatcgtgatccattaacagttatgcgcatctttacttcggatagtaccttgggcggcgtaacgttcaagagtgatacgtatgatcaattaatccaagagactagaacaacacatgcggctgatcaagaggctcgtttaaatgactttgctcaagcacaagatattttggtgaatcaggaaacggttttagcaccaatctacaatcgaagcatttctgtattagctaatcaaaaaatcaaggatctgtattggcattcatttggacctacgtacagtttaaaatgggcctatgttaactaa

SEQ ID NO: 378 - protein, 553 aa, Enterococcus faecalis; identical to SEQ ID NO: 72

SEQ ID NO: 379 - DNA, 1459 bp, Enterococcus faecalis
atgaagaaattaaaaatgttaggatgcgtcggtttgcttttagctttaacggcttgtcaggcgggaacgggaaactcggctgatagtaacaaagtagcggaacaaaaaattgcaattagttctgaagcggctatttcgacaatggaaccacacacagcgggggatacgacctcgactttagtcatgaatcaagtttatgaaggactctatgttttaggtaaagaagatgaattagagttgggggtcgctgccgaagaaccagcgatttctgaagatgaaaccgtttatacatttaagattagagaagatgccaaatggtcgaatgatgatccagtaacagcaaacgactttgtttatgcatggcaacaagttgcttcccctaaatcagggtcgattcatcaagctttattttttgatgtcattaaaaatgctaaggaaattgctttagaaggcgcagatgtgaatactcttggggttaaggcgctagatgataaaacgttagaaataactttagagcggcctaccccttatttgaaatctttgctttcgtttcctgttttgtttccgcaaaatgaaaaatatatcaaagaacaaggggataaatatgccactgatgcagaacatttgatttataatggttcttttaaattgaaagaatgggataatgcctcttccgatgactggacctacgaaaaaaatgatacgtattgggatgctgaaaaagttaaattaacagaagcgaaagtttcagtaattaagagcccaacgacagcggtgaatttgtttgactcgaatgaattggatgtagtgaataagctaagtggtgaatttattcctggttatgttgataagccagcctttctttcaattcctcaattcgtcacatactttttaaaaatgaacagcgttcgtgatggaaaagaaaatccggctttagcgaacaacaatattcgtaaagcgttggcacaagcttttgataaagaaagttttgtaaaagaagtcttgcaagatcaatcaacggctacagatcaagtaattcctccgggacaaacgattgcgccagatggaacagatttcacaaaactagctgctaagaaaaataactacttaacctacgatacagcgaaagcaaaagaattctgggaaaaagggaaaaaagaaattgggctggataaaatcaaattagaatttttaacagatgatacagacagcgccaaaaaagctgctgagtttttccaatttcaattggaagaaaatctagatggattagaagtgaatgttactcaagttccttttactattcgtgttgatcgtgatcaaacgagagactatgatttaaaattatctggttggggaaccgattatcgtgatccattaacagttatgcgcatctttacttcggatagtaccttgggcggcgtaacgttcaagagtgatacgtatgatcaattaattcaag

SEQ ID NO: 380 - protein, 486 aa, Enterococcus faecalis
MKKLKMLGCVGLLLALTACQAGTGNSADSNKVAEQKIAISSEAAISTMEPHTAGDTTSTLVMNQVYEGLYVLGKEDELELGVAAEEPAISEDETVYTFKIREDAKWSNDDPVTANDFVYAWQQVASPKSGSIHQALFFDVIKNAKEIALEGADVNTLGVKALDDKTLEITLERPTPYLKSLLSFPVLFPQNEKYIKEQGDKYATDAEHLIYNGSFKLKEWDNASSDDWTYEKNDTYWDAEKVKLTEAKVSVIKSPTTAVNLFDSNELDVVNKLSGEFIPGYVDKPAFLSIPQFVTYFLKMNSVRDGKENPALANNNIRKALAQAFDKESFVKEVLQDQSTATDQVIPPGQTIAPDGTDFTKLAAKKNNYLTYDTAKAKEFWEKGKKEIGLDKIKLEFLTDDTDSAKKAAEFFQFQLEENLDGLEVNVTQVPFTIRVDRDQTRDYDLKLSGWGTDYRDPLTVMRIFTSDSTLGGVTFKSDTYDQLIQ

SEQ ID NO: 381 - DNA, 1662 bp, Enterococcus faecalis
atgaagaaattaaaaatgttaggatgcgtcggtttgcttttagctttaacggcttgtcaggcgggaacgggaaactcggctgatagtaacaaagcagcggaacaaaaaattgcaattagttctgaagcggctatttcgacaatggaaccacacacagcgggggatacgaccttgactttagtcatgaatcaagtttatgaaggactctatgttttaggtaaagaagatgaattagagttgggggtcgctgccgaagaaccagcgatttctgaagatgaaaccgtttatacatttaagattagagaagatgccaaatggtcgaatgatgatccagtaacagcaaacgactttgtttatgcatggcaacaagttgcttcccctaaatcagggtcgattcatcaagctttattttttgatgtcattaaaaatgctaaggaaattgctttagaaggcgcagatgtgaatactcttggggttaaggcgctagatgataaaacgttagaaataactttagagcggcctaccccttatttgaaatctttgctttcgtttcctgttttgtttccgcaaaatgaaaaatatatcaaagaacaaggggataaatatgccactgatgcagaacatttgatttataatggtccttttaaattgaaagaatgggataatgcctcttccgatgactggacctacgaaaaaaatgatacgtattgggatgctgaaaaagttaaattaacagaagcgaaagtttcagtaattaagagcccaacgacagcggtgaatttgtttgactcgaatgaattggatgtagtgaataagctaagtggtgaatttattcctggttatgttgataatccagcctttctttcaattcctcaattcgtcacatactttttaaaaatgaacagcgttcgtgatggaaaagaaaatccggctttagcgaacaacaatattcgtaaagcgttggcacaagcttttgataaagaaagttttgtaaaagaagtcttgcaagatcaatcaacggctacagatcaagtaattcctccgggacaaacgattgcgccagatggaacagatttcacaaaactagctgctaagaaaaataactacttaacctacgatacagcgaaagcaaaagaattctgggaaaaagggaaaaaagaaattgggctggataaaatcaaattagaatttttaacagatgatacagacagcgccaaaaaagctgctgagtttttccaatttcaattggaagaaaatctagatggattagaagtgaatgttactcaagttccttttactattcgtgttgatcgtgatcaaacgagagactatgatttagaattatctggttggggaaccgattatcgtgatccattaacagttatgcgcatctttacttcggatagtaccttgggcggcgtaacgttcaagagtgatacgtatgatcaattaattcaagaaactagaacaacacatgcggctgatcaagaggctcgtttaaatgactttgctcaagcacaagatattttggtgaatcaggaaacggttttagcaccaatctacaatcgaagcatttctgtattagctaatcaaaaaatcaaggatctgtattggcattcatttggacctacgtacagtttaaaatgggcttatgttaactaa

SEQ ID NO: 382 - protein, 553 aa, Enterococcus faecalis
MKKLKMLGCVGLLLALTACQAGTGNSADSNKAAEQKIAISSEAAISTMEPHTAGDTTLTLVMNQVYEGLYVLGKEDELELGVAAEEPAISEDETVYTFKIREDAKWSNDDPVTANDFVYAWQQVASPKSGSIHQALFFDVIKNAKEIALEGADVNTLGVKALDDKTLEITLERPTPYLKSLLSFPVLFPQNEKYIKEQGDKYATDAEHLIYNGPFKLKEWDNASSDDWTYEKNDTYWDAEKVKLTEAKVSVIKSPTTAVNLFDSNELDVVNKLSGEFIPGYVDNPAFLSIPQFVTYFLKMNSVRDGKENPALANNNIRKALAQAFDKESFVKEVLQDQSTATDQVIPPGQTIAPDGTDFTKLAAKKNNYLTYDTAKAKEFWEKGKKEIGLDKIKLEFLTDDTDSAKKAAEFFQFQLEENLDGLEVNVTQVPFTIRVDRDQTRDYDLELSGWGTDYRDPLTVMRIFTSDSTLGGVTFKSDTYDQLIQETRTTHAADQEARLNDFAQAQDILVNQETVLAPIYNRSISVLANQKIKDLYWHSFGPTYSLKWAYVN

SEQ ID NO: 383 - DNA, 1662 bp, Enterococcus faecalis
atgaagaaattaaaaatgttaggatgcgtcggtttgcttttagctttaacggcttgtcaggcgggaacgggaaactcggctgatagtaacaaagcagcggaacaaaaaattgcaattagttctgaagcggctatttcgacaatggaaccacacacagcgggggatacgacctcgactttagtcatgaatcaagtttatgaaggactctatgttttaggtaaagaagatgaattagagttgggggtcgctgccgaagaaccagcgatttctgaagatgaaaccgtttatacatttaagattagagaagatgccaaatggtcgaatgatgatccagtaacagcaaacgactttgtttatgcatggcaacaagttgcttcccctaaatcaggatcgattcatcaagctttattttttgatgtcattaaaaatgctaaggaaattgctttagaaggcgcagatgtgaatactcttggggttaagtcgctagatgataaaacgttagaaataactttagaacggcccaccccttatttgaaatctttgctttcgtttcctgttttgtttccacaaaatgaaaaatatatcaaagaacaaggggataaatatgccactgatgcagaacatttgatttataatggtccttttaaattgaaagaatgggataatgcctcttccgatgactggacctacgaaaaaaatgatacgtattgggatgctgaaaaagttaaattaacagaagcgaaagtttcagtaattaagagcccaacgacagcggtgaatttgtttgactcgaatgaattggatgtagtgaataagctaagtggtgaatttattcctggttatgttgataatccagcctttctttcaattcctcaattcgtcacatactttttaaaaatgaacagcgttcgtgatggaaaagaaaatccggctttagcgaacaacaatattcgtaaagcgttggcacaagcttttgataaagaaagttttgtaaaagaagtcttgcaagatcaatcaacggctacagatcaagtaattcctccgggacaaacgattgcgccagatggaacagatttcacaaaactagctgctaagaaaaataactacttaacctacgatacagcgaaagcaaaagaattctgggaaaaagggaaaaaagaaattgggctggataaaatcaaattagaatttttaacagatgatacagacagcgccaaaaaagctgctgagtttttccaatttcaattggaagaaaatctagatggattagaagtgaatgttactcaagttccttttactattcgtgttgatcgtgatcaaacgagagactatgatttagaattatctggttggggaaccgattatcgtgatccattaacagttatgcgcatctttacttcggatagtaccttgggcggcgtaacgttcaagagtgatacgtatgatcaattaattcaagaaactagaacaacacatgcggctgatcaagaggctcgtttaaatgactttgctcaagcacaagatattttggtgaatcaggaaacggttttagcaccaatctacaatcgaagcatttctgtattagctaatcaaaaaatcaaggatatgtattggcattcatttggacctacgtacagtttaaaatgggcttatgttaactaa

SEQ ID NO: 384 - protein, 553 aa, Enterococcus faecalis
MKKLKMLGCVGLLLALTACQAGTGNSADSNKAAEQKIAISSEAAISTMEPHTAGDTTSTLVMNQVYEGLYVLGKEDELELGVAAEEPAISEDETVYTFKIREDAKWSNDDPVTANDFVYAWQQVASPKSGSIHQALFFDVIKNAKEIALEGADVNTLGVKSLDDKTLEITLERPTPYLKSLLSFPVLFPQNEKYIKEQGDKYATDAEHLIYNGPFKLKEWDNASSDDWTYEKNDTYWDAEKVKLTEAKVSVIKSPTTAVNLFDSNELDVVNKLSGEFIPGYVDNPAFLSIPQFVTYFLKMNSVRDGKENPALANNNIRKALAQAFDKESFVKEVLQDQSTATDQVIPPGQTIAPDGTDFTKLAAKKNNYLTYDTAKAKEFWEKGKKEIGLDKIKLEFLTDDTDSAKKAAEFFQFQLEENLDGLEVNVTQVPFTIRVDRDQTRDYDLELSGWGTDYRDPLTVMRIFTSDSTLGGVTFKSDTYDQLIQETRTTHAADQEARLNDFAQAQDILVNQETVLAPIYNRSISVLANQKIKDMYWHSFGPTYSLKWAYVN

SEQ ID NO: 385 - DNA, 1662 bp, Enterococcus faecalis
atgaagaaattaaaaatgttaggatgcgtcggtttgcttttagctttaacggcttgtcaggcgggaacgggaaactcggctgatagtaacaaagtagcggaacaaaaaattgcaattagttctgaagcggctatttcgacaatggaaccacacacagcgggggatacgacctcgactttagtcatgaatcaagtttatgaaggactctatgttttaggtaaagaagatgaattagagttgggggtcgctgccgaagaaccagcgatttctgaagatgaaaccgtttatacatttaagattagagaagatgccaaatggtcgaatgatgatccagtaacagcaaacgactttgtttatgcatggcaacaagttgcttcccctaaatcagggtcgattcatcaagctttattttttgatgtcattaaaaatgctaaggaaattgctttagaaggcgcagatgtgaatactcttggggttaaggcgctagatgataaaacgttagaaataactttagagcggcccaccccttatttgaaatctttgctttcgtttcctgttttgtttccgcaaaatgaaaaatatatcaaagaacaaggggataaatatgccactgatgcagaacatttgatttataatggttcttttaaattgaaagaatgggataatgcctcttccgatgactggacctacgaaaaaaatgatacgtattgggatgctgaaaaagttaaattaacagaagcgaaagtttcagtaattaagagcccaacgacagcggtgaatttgtttgactcgaatgaattggatgtagtgaataagctaagtggtgaatttattcctggttatgttgataatccagcctttctttcaatccctcaattcgtcacatactttttaaaaatgaacagcgttcgtgatggaaaagaaaatccggctttagcgaacaacaatattcgtaaagcgttggcacaagcttttgataaagaaagttttgtaaaagaagtcttgcaagatcaatcaacggctacagatcaagtaattcctccgggacaaacgattgcgccagatggaacagatttcacaaaactagctgctaagaaaaataactacttaacctacgatacagcgaaagcaaaagaattctgggaaaaagggaaaaaagaaattgggctggataaaatcaaattagaatttttaacagatgatacagacagcgccaaaaaagctgctgagtttttccaatttcaattggaagaaaatctagatggattagaagtgaatgttactcaagttccttttactattcgtgttgatcgtgatcaaacgagagactatgatttagaattatctggttggggaaccgattatcgtgatccattaacagttatgcgcatctttacttcggatagtaccttgggcggcgtaacgttcaagagtgatacgtatgatcaattaattcaagaaactagaacaacacatgcggctgatcaagaggctcgtttaaatgactttgctcaagcacaagatattttggtgaatcaggaaacggttttagcaccaatctacaatcgaagcatttctgtattagctaatcaaaaaatcaaggatctgtattggcattcatttggacctacgtacagtttaaaatgggcttatgttaactaa

SEQ ID NO: 386 - protein, 553 aa, Enterococcus faecalis
MKKLKMLGCVGLLLALTACQAGTGNSADSNKVAEQKIAISSEAAISTMEPHTAGDTTSTLVMNQVYEGLYVLGKEDELELGVAAEEPAISEDETVYTFKIREDAKWSNDDPVTANDFVYAWQQVASPKSGSIHQALFFDVIKNAKEIALEGADVNTLGVKALDDKTLEITLERPTPYLKSLLSFPVLFPQNEKYIKEQGDKYATDAEHLIYNGSFKLKEWDNASSDDWTYEKNDTYWDAEKVKLTEAKVSVIKSPTTAVNLFDSNELDVVNKLSGEFIPGYVDNPAFLSIPQFVTYFLKMNSVRDGKENPALANNNIRKALAQAFDKESFVKEVLQDQSTATDQVIPPGQTIAPDGTDFTKLAAKKNNYLTYDTAKAKEFWEKGKKEIGLDKIKLEFLTDDTDSAKKAAEFFQFQLEENLDGLEVNVTQVPFTIRVDRDQTRDYDLELSGWGTDYRDPLTVMRIFTSDSTLGGVTFKSDTYDQLIQETRTTHAADQEARLNDFAQAQDILVNQETVLAPIYNRSISVLANQKIKDLYWHSFGPTYSLKWAYVN

SEQ ID NO: 387 - DNA, 1662 bp, Enterococcus faecalis
atgaagaaattaaaaatgttaggatgcgtcggtttgcttttagctttaacggcttgtcaggcgggaacgggaaactcggctgatagtaacaaagcagcggaacaaaaaattgcaattagttctgaagcggctatttcgacaatggaaccacacacagcgggggatacgacctcgactttagtcatgaatcaagtttatgaaggactctatgttttaggtaaagaagatgaattagagttgggggtcgctgccgaagaaccagcgatttctgaagatgaaaccgtttatacatttaagattagagaagatgccaaatggtcgaacgatgatccagtgacagcaaatgactttgtttatgcatggcaacaagttgcttcccctaaatcagggtcgattcatcaagcgttattttttgatgtcattaaaaatgctaaggaaattgctttagaaggcgcagatgtgaatactcttggggttaaggcgctagatgataaaacgttagaaataactttagaacggcccaccccttatttgaaatcattactttcgtttcctgttttgtttccacaaaatgaaaaatatatcaaagaacaaggggataaatatgccactgatgcagaacatttgatttataatggtccttttaaattgaaagaatgggataatgcctcttccgatgactggacctacgaaaaaaatgatacgtattgggatgctgaaaaagttaaattaacagaagcgaaagtttcagtaattaagagcccaacgacagcggtgaatttgtttgactcgaatgaattggatgtagtgaataagctaagtggtgaatttattcctggttatgttgataatccagcctttctttcaattcctcaattcgtcacatactttttaaaaatgaacagcgttcgtgatggaaaagaaaatccggctttagcgaacaacaatattcgtaaagcgttggcacaagcttttgataaagaaagttttgtaaaagaagtcttgcaagatcaatccacggctacagatcaagtaattccgccggggcaaacgattgcgccagatggaacagatttcacaaaactagctgctaagaaaaatagctacttaacctacgatacagcgaaagcaaaagaattctgggaaaaagggaaaaaagaaattgggctggataaaatcaaattagaatttttaacagatgatacagacagcgccaaaaaagctgctgagtttttccaatttcaattggaagaaaatctagatggattagaagtgaatgttactcaagttccttttactattcgtgttgatcgtgatcaaacgagagactatgatttagaattatctggttggggaaccgattatcgtgatccattaacagttatgcgcatctttacttcggatagtaccttgggcggcgtaacgttcaagagtgatacgtatgatcaattaattcaagaaactagaacaacacatgcggctgatcaagaggctcgtttaaatgactttgctcaagcacaagatattttggtgaatcaggaaacggttttagcaccaatctacaatcgaagcatttctgtattagctaatcaaaaaatcaaggatctgtattggcattcatttggacctacgtacagtttaaaatgggcttatgttaactaa

SEQ ID NO: 388 - protein, 553 aa, Enterococcus faecalis
MKKLKMLGCVGLLLALTACQAGTGNSADSNKAAEQKIAISSEAAISTMEPHTAGDTTSTLVMNQVYEGLYVLGKEDELELGVAAEEPAISEDETVYTFKIREDAKWSNDDPVTANDFVYAWQQVASPKSGSIHQALFFDVIKNAKEIALEGADVNTLGVKALDDKTLEITLERPTPYLKSLLSFPVLFPQNEKYIKEQGDKYATDAEHLIYNGPFKLKEWDNASSDDWTYEKNDTYWDAEKVKLTEAKVSVIKSPTTAVNLFDSNELDVVNKLSGEFIPGYVDNPAFLSIPQFVTYFLKMNSVRDGKENPALANNNIRKALAQAFDKESFVKEVLQDQSTATDQVIPPGQTIAPDGTDFTKLAAKKNSYLTYDTAKAKEFWEKGKKEIGLDKIKLEFLTDDTDSAKKAAEFFQFQLEENLDGLEVNVTQVPFTIRVDRDQTRDYDLELSGWGTDYRDPLTVMRIFTSDSTLGGVTFKSDTYDQLIQETRTTHAADQEARLNDFAQAQDILVNQETVLAPIYNRSISVLANQKIKDLYWHSFGPTYSLKWAYVN

SEQ ID NO: 389 - DNA, 1662 bp, Enterococcus faecalis
atgaagaaattaaaaatgttaggatgcgtcggtttgcttttagctttaacggcttgtcaggcgggaacgggaaactcggctgatagtaacaaagcagcggaacaaaaaattgcaattagttctgaagcggctatttcgacaatggaaccacacacagcgggggatacgacctcgactttagtcatgaatcaagtttatgaaggactctatgttttaggtaaagaagatgaattagagttgggggtcgctgccgaagaaccagcgatttctgaagatgaaaccgtttatacatttaagattagagaagatgccaaatggtcgaatgatgatccagtaacagcaaacgactttgtttatgcatggcaacaagttgcttcccctaaatcagggtcgattcatcaagcgttattttttgatgtcattaaaaatgctaaggaaattgctttagaaggcgcagatgtgaatactcttggggttaaggcgctagatgataaaacgttagaaataactttagagcggcctaccccttatttgaaatcattactttcgtttcctgttttgtttccacaaaatgaaaaatatatcaaagaacaaggggataaatatgccactgatgcagaacatttgatttataatggtccttttaaattgaaagaatgggataatgcctcttccgatgactggacctacgaaaaaaatgatacgtattgggatgctgaaaaagttaaattaacagaagcgaaagtttcagtaattaagagcccaacgacagcggtgaatttgtttgactcgaatgaattggatgtagtgaataagctaagtggtgaatttattcctggttatgttgataatccagcctttctttcaattcctcaattcgtcacatactttttaaaaatgaacagcgttcgtgatggaaaagaaaatccggctttagcgaacaacaatattcgtaaagcgttggcacaagcttttgataaagaaagttttgtaaaagaagtcttgcaagatcaatcaacggctacagatcaagtaattccgccgggacaaacgattgcgccagatggaacagatttcacaaaactagctgctaagaaaaataactatttaacctacgatacagcgaaagcaaaagaattctgggaaaaagggaaaaaagaaattgggctggataaaatcaaattagaatttttaacagatgatacagacagcgccaaaaaagctgctgagtttttccaatttcaattggaagaaaatctagatggattagaagtgaatgttactcaagttccttttactattcgtgttgatcgtgatcaaacgagagactatgatttagaattatctggttggggaaccgattatcgtgatccattaacagttatgcgcatctttacttcggatagtaccttgggcggcgtaacgttcaagagtgatacgtatgatcaattaattcaagaaactagaacaacacatgcggctgatcaagaggctcgtttaaatgactttgctcaagcacaagatattttggtgaatcaggaaacggttttagcaccaatctacaatcgaagcatttctgtattagctaatcaaaaaatcaaggatctgtattggcattcatttggacctacgtacagtttaaaatgggcttatgttaactaa

SEQ ID NO: 390 - protein, 553 aa, Enterococcus faecalis; identical to SEQ ID NO: 72

SEQ ID NO: 391 - DNA, 1662 bp, Enterococcus faecalis
atgaagaaattaaaaatgttaggatgcgtcggtttgcttttagctttaacggcttgtcaggcgggaacgggaaactcggctgatagtaacaaagcagcggaacaaaaaattgcaattagttctgaagcggctatttcgacaatggaaccacacacagcgggggatacgacctcgactttagtcatgaatcaagtttatgaaggactctatgttttaggtaaagaagatgaattagagttgggggtcgctgccgaagaaccagcgatttctgaagatgaaaccgtttatacatttaagattagagaagatgccaaatggtcgaatgatgatccagtaacagcaaacgactttgtttatgcatggcaacaagttgcttcccctaaatcaggatcgattcatcaagctttattttttgatgtcattaaaaatgctaaggaaattgctttagaaggcgcagatgtgaatactcttggggttaaggcgctagatgataaaacgttagaaataactttagaacggcccaccccttatttgaaatctttgctttcgtttcctgttttgtttccgcaaaatgaaaaatatatcaaagaacaaggggataaatatgccactgatgcagaacatttgatttataatggtccttttaaattgaaagaatgggataatgcctcttccgatgactggacctacgaaaaaaatgatacgtattgggatgctgaaaaagttaaattaacagaagcgaaagtttcagtaattaagagcccaacgacagcggtgaatttgtttgactcgaatgaattggatgtagtgaataagctaagtggtgaatttattcctggttatgttgataatccagactttctttcaattcctcaattcgtcacatactttttaaaaatgaacagcgttcgtgatggaaaagaaaatccggctttagcgaacaacaatattcgtaaagcgttggcacaagcttttgataaagaaagttttgtaaaagaagtcttgcaagatcaatcaacggctacagatcaagtaattcctccgggacaaacgattgcgccagatggaacagatttcacaaaactagctgctaagaaaaataactacttaacctacgatacagcgaaagcaaaagaattctgggaaaaagggaaaaaagaaattgggctggataaaatcaaattagaatttttaacagatgatacagacagcgccaaaaaagctgctgagtttttccaatttcaattggaagaaaatctagatggattagaagtgaatgttactcaagttccttttactattcgtgttgatcgtgatcaaacgagagactatgatttagaattatctggttggggaaccgattatcgtgatccattaacagttatgcgcatctttacttcggatagtaccttgggcggcgtaacgttcaagagtgatacgtatgatcaattaattcaagaaactagaacaacacatgcggctgatcaagaggctcgtttaaatgactttgctcaagcacaagatattttggtgaatcaggaaacggttttagcaccaatctacaatcgaagcatttctgtattagctaatcaaaaaatcaaggatctgtattggcattcatttggacctacgtacagtttaaaatgggcttatgttaactaa

SEQ ID NO: 392 - protein, 553 aa, Enterococcus faecalis
MKKLKMLGCVGLLLALTACQAGTGNSADSNKAAEQKIAISSEAAISTMEPHTAGDTTSTLVMNQVYEGLYVLGKEDELELGVAAEEPAISEDETVYTFKIREDAKWSNDDPVTANDFVYAWQQVASPKSGSIHQALFFDVIKNAKEIALEGADVNTLGVKALDDKTLEITLERPTPYLKSLLSFPVLFPQNEKYIKEQGDKYATDAEHLIYNGPFKLKEWDNASSDDWTYEKNDTYWDAEKVKLTEAKVSVIKSPTTAVNLFDSNELDVVNKLSGEFIPGYVDNPDFLSIPQFVTYFLKMNSVRDGKENPALANNNIRKALAQAFDKESFVKEVLQDQSTATDQVIPPGQTIAPDGTDFTKLAAKKNNYLTYDTAKAKEFWEKGKKEIGLDKIKLEFLTDDTDSAKKAAEFFQFQLEENLDGLEVNVTQVPFTIRVDRDQTRDYDLELSGWGTDYRDPLTVMRIFTSDSTLGGVTFKSDTYDQLIQETRTTHAADQEARLNDFAQAQDILVNQETVLAPIYNRSISVLANQKIKDLYWHSFGPTYSLKWAYVN

SEQ ID NO: 393 - DNA, 1662 bp, Enterococcus faecalis
atgaagaaattaaaaatgttaggatgcgtcggtttgcttttagctttaacggcttgtcaggcgggaacgggaaactcggctgatagtaacaaagtagcggaacaaaaaattgcaattagttctgaagcggctatttcgacaatggaaccacacacagcgggggatacgacctcgactttagtcatgaatcaagtttatgaaggactctatgttttaggtaaagaagatgaattagagttgggggtcgctgccgaagaaccagcgatttctgaagatgaaaccgtttatacatttaagattagagaagatgccaaatggtcgaatgatgatccagtaacagcaaacgactttgtttatgcatggcaacaagttgcttcccctaaatcagggtcgattcatcaagctttattttttgatgtcattaaaaatgctaaggaaattgctttagaaggcgcagatgtgaatactcttggggttaaggcgctagatgataaaacgttagaaataactttagagcggcctaccccttatttgaaatctttgctttcgtttcctgttttgtttccgcaaaatgaaaaatatatcaaagaacaaggggataaatatgccactgatgcagaacatttgatttataatggtccttttaaattgaaagaatgggataatgcctcttccgatgactggacctacgaaaaaaatgatacgtattgggatgctgaaaaagttaaattaacagaagcgaaagtttcagtaattaagagcccaacgacagcggtgaatttgtttgactcgaatgaattggatgtagtgaataagctaagtggtgaatttattcctggttatgttgataatccagcctttctttcaattcctcaattcgtcacatactttttaaaaatgaacagcgttcgtgatggaaaagaaaatccggctttagcgaacaacaatattcgtaaagcgttggcacaagcttttgataaagaaagttttgtaaaagaagtcttgcaagatcaatcaacggctacagatcaagtaattcctccgggacaaacgattgcgccagatggaacagatttcacaaaactagctgctaagaaaaataactacttaacctacgatacagcgaaagcaaaagaattctgggaaaaagggaaaaaagaaattgggctggataaaatcaaattagaatttttaacagatgatacagacagcgccaaaaaagctgctgagtttttccaatttcaattggaagaaaatctagatggattagaagtgaatgttactcaagttccttttactattcgtgttgatcgtgatcaaacgagagactatgatttagaattatctggttggggaaccgattatcgtgatccattaacagttatgcgcatctttacttcggatagtaccttgggcggcgtaacgttcaagagtgatacgtatgatcaattaattcaagaaactagaacaacacatgcggctgatcaagaggctcgtttaaatgactttgctcaagcacaagatattttggtgaatcaggaaacggttttagcaccaatctacaatcgaagcatttctgtattagctaatcaaaaaatcaaggatctgtattggcattcatttggacctacgtacagtttaaaatgggcttatgttaactaa

SEQ ID NO: 394 - protein, 553 aa, Enterococcus faecalis
MKKLKMLGCVGLLLALTACQAGTGNSADSNKVAEQKIAISSEAAISTMEPHTAGDTTSTLVMNQVYEGLYVLGKEDELELGVAAEEPAISEDETVYTFKIREDAKWSNDDPVTANDFVYAWQQVASPKSGSIHQALFFDVIKNAKEIALEGADVNTLGVKALDDKTLEITLERPTPYLKSLLSFPVLFPQNEKYIKEQGDKYATDAEHLIYNGPFKLKEWDNASSDDWTYEKNDTYWDAEKVKLTEAKVSVIKSPTTAVNLFDSNELDVVNKLSGEFIPGYVDNPAFLSIPQFVTYFLKMNSVRDGKENPALANNNIRKALAQAFDKESFVKEVLQDQSTATDQVIPPGQTIAPDGTDFTKLAAKKNNYLTYDTAKAKEFWEKGKKEIGLDKIKLEFLTDDTDSAKKAAEFFQFQLEENLDGLEVNVTQVPFTIRVDRDQTRDYDLELSGWGTDYRDPLTVMRIFTSDSTLGGVTFKSDTYDQLIQETRTTHAADQEARLNDFAQAQDILVNQETVLAPIYNRSISVLANQKIKDLYWHSFGPTYSLKWAYVN

SEQ ID NO: 395 - DNA, 1662 bp, Enterococcus faecalis
atgaagaaattaaaaatgttaggatgcgtcggtttgcttttagctttaacggcttgtcaggcgggaacgggaaactcggctgatagtaacaaagcagcggaacaaaaaattgcaattagttctgaagcggctatttcgacaatggaaccacacacagcgggggatacgacctcgactttagtcatgaatcaagtttatgaaggactctatgttttaggtaaagaagatgaattagagttgggggtcgctgccgaagaaccagcgatttctgaagatgaaaccgtttatacatttaagattagagaagatgccaaatggtcgaatgatgatccagtaacagcaaacgactttgtttatgcatggcaacaagttgcttcccctaaatcaggatcgattcatcaagctttattttttgatgtcattaaaaatgctaaggaaattgctttagaaggcgcagatgtgaatactcttggggttaaggcgctagatgataaaacgttagaaataactttagaacggcccaccccttatttgaaatctttgctttcgtttcctgttttgtttccgcaaaatgaaaaatatatcaaagaacaaggggataaatatgccactgatgcagaacatttgatttataatggtccttttaaattgaaagaatgggataatgcctcttccgatgactggacctacgaaaaaaatgatacgtattgggatgctgaaaaagttaaattaacagaagcgaaagtttcagtaattaagagcccaacgacagcggtgaatttgtttgactcgaatgaattggatgtagtgaataagctaagtggtgaatttattcctggttatgttgataatccagcctttctttcaattcctcaattcgtcacatactttttaaaaatgaacagcgttcgtgatggaaaagaaaatccggctttagcgaacaacaatattcgtaaagcgttggcacaagcttttgataaagaaagttttgtaaaagaagtcttgcaagatcaatcaacggctacagatcaagtaattccgccgggacaaacgattgcgccagatggaacagatttcacaaaactagctgctaagaaaaataactacttaacctacgatacagcgaaagcaaaagaattctgggaaaaagggaaaaaagaaattgggctggataaaatcaaattagaatttttaacagatgatacagacagcgccaaaaaagctgctgagtttttccaatttcaattggaagaaaatctagatggattagaagtgaatgttactcaagttccttttactattcgtgttgatcgtgatcaaacgagagactatgatttagaattatctggttggggaaccgattatcgtgatccattaacagttatgcgcatctttacttcggatagtaccttgggcggcgtaacgttcaagagtgatacgtatgatcaattaattcaagaaactagaacaacacatgcggctgatcaagaggctcgtttaaatgactttgctcaagcacaagatattttggtgaatcaggaaacggttttagcaccaatctacaatcgaagcatttctgtattagctaatcaaaaaatcaaggatctgtattggcattcatttggacctacgtacagtttaaaatgggcttatgttaactaa

SEQ ID NO: 396 - protein, 553 aa, Enterococcus faecalis; identical to SEQ ID NO: 72

SEQ ID NO: 397 - DNA, 1662 bp, Enterococcus faecalis
atgaagaaattaaaaatgttaggatgcgtcggtttgcttttagctttaacggcttgtcaggcgggaacgggaaactcggctgatagtaacaaagtagcggaacaaaaaattgcaattagttctgaagcggctatttcgacaatggaaccacacacagcgggggatacgacctcgactttagtcatgaatcaagtttatgaaggactctatgttttaggtaaagaagatgaattagagttgggggtcgctgccgaagaaccagcgatttctgaagatgaaaccgtttatacatttaagattagagaagatgccaaatggtcgaatgatgatccagtaacagcaaacgactttgtttatgcatggcaacaagttgcttcccctaaatcagggtcgattcatcaagctttattttttgatgtcattaaaaatgctaaggaaattgctttagaaggcgcagatgtgaatactcttggggttaaggcgctagatgataaaacgttagaaataactttagagcggcctaccccttatttgaaatctttgctttcgtttcctgttttgtttccgcaaaatgaaaaatatatcaaagaacaaggggataaatatgccactgatgcagaacatttgatttataatggttcttttaaattgaaagaatgggataatgcctcttccgatgactggacctacgaaaaaaatgatacgtattgggatgctgaaaaagttaaattaacagaagcgaaagtttcagtaattaagagcccaacgacagcggtgaatttgtttgactcgaatgaattggatgtagtgaataagctaagtggtgaatttattcctggttatgttgataatccagcctttctttcaattcctcaattcgtcacatactttttaaaaatgaacagcgttcgtgatggaaaagaaaatccggctttagcgaacaacaatattcgtaaagcgttggcacaagcttttgataaagaaagttttgtaaaagaagtcttgcaagatcaatcaacggctacagatcaagtaattcctccgggacaaacgattgcgccagatggaacagatttcacaaaactagctgctaagaaaaataactacttaacctacgatacagcgaaagcaaaagaattctgggaaaaagggaaaaaagaaattgggctggataaaatcaaattagaatttttaacagatgatacagacagcgccaaaaaagctgctgagtttttccaatttcaattggaagaaaatctagatggattagaagtgaatgttactcaagttccttttactattcgtgttgatcgtgatcaaacgagagactatgatttagaattatctggttggggaaccgattatcgtgatccattaacagttatgcgcatctttacttcggatagtaccttgggcggcgtaacgttcaagagtgatacgtatgatcaattaattcaagaaactagaacaacacatgcggctgatcaagaggctcgtttaaatgactttgctcaagcacaagatattttggtgaatcaggaaacggttttagcaccaatctacaatcgaagcatttctgtattagctaatcaaaaaatcaaggatctgtattggcattcatttggacctacgtacagtttaaaatgggcttatgttaactaa

SEQ ID NO: 398 - protein, 553 aa, Enterococcus faecalis; identical to SEQ ID NO: 386

SEQ ID NO: 399 - DNA, 1662 bp, Enterococcus faecalis
atgaagaaattaaaaatgttaggatgcgtcggtttgcttttagctttaacggcttgtcaggcgggaacgggaaactcggctgatagtaacaaagcagcggaacaaaaaattgcaattagttctgaagcggctatttcgacaatggaaccacacacagcgggggatacgacctcgactttagtcatgaatcaagtttatgaaggactctatgttttaggtaaagaagacgagttagagttgggggtcgctgccgaagaaccagcgatttctgaagatgaaaccgtttatacatttaagattagagaagatgccaaatggtcgaatgatgatccagtaacagcaaatgactttgtttatgcatggcaacaagttgcttcccttaaatcagggtcgattcatcaagcgttattttttgatgtcattaaaaatgctaaggaaattgctttagaaggcgcagatgtgaatactcttggggttaaggcgctagatgataaaacgttagaaataactttagaacggccccccccttatttgaaatcattactttcgtttcctgttttgtttccacaaaatgaaaaatatatcaaagaacaaggggataaatatgccactgatgcagaacatttgatttataatggtccttttaaattgaaagaatgggataatgccttttccgatgactggacctacgaaaaaaatgatacgtattgggatgctgaaaaagttaaattaacagaagcgaaagtttcagtaattaagagcccaacgacagcggtgaatttgtttgactcgaatgaattggatgtagtgaataagctaagtggtgaatttattcctggttatgttgataatccagcctttctttcaattcctcaattcgtcacatactttttaaaaatgaacagcgttcgtgatggaaaagaaaatccggctttagcgaacaacaatattcgtaaagcgttggcacaagcttttgataaagaaagttttgtaaaagaagtcttgcaagatcaatcaacggctacagatcaagtaattccgccgggacaaacgattgcgccagatggaacagatttcacaaaactagctgctaagaaaaataactacttaacctacgatacagcgaaagcaaaagaattctgggaaaaagggaaaaaagaaattgggctggataaaatcaaattagaatttttaacagatgatacagacagcgccaaaaaagctgctgagtttttccaatttcaattggaagaaaatctagatggattagaagtgaatgttactcaagttccttttactattcgtgttgatcgtgatcaaacgagagactatgatttagaattatctggttggggaaccgattatcgtgatccattaacagttatgcgcatctttacttcggatagtaccttgggcggcgtaacgttcaagagtgatacgtatgataaattaattcaagaaactagaacaacacatgcggctgatcaagaggctcgtttaaatgactttactcaagcacaagatattttggtgaatcaggaaacggttttagcaccaatctacaatcgaagcatttctgtattagctaatcaaaaaatcaaggatctgtattggcattcatttggacctacgtacagtttaaaatgggcttatgttaactaa

SEQ ID NO: 400 - protein, 553 aa, Enterococcus faecalis
MKKLKMLGCVGLLLALTACQAGTGNSADSNKAAEQKIAISSEAAISTMEPHTAGDTTSTLVMNQVYEGLYVLGKEDELELGVAAEEPAISEDETVYTFKIREDAKWSNDDPVTANDFVYAWQQVASLKSGSIHQALFFDVIKNAKEIALEGADVNTLGVKALDDKTLEITLERPPPYLKSLLSFPVLFPQNEKYIKEQGDKYATDAEHLIYNGPFKLKEWDNAFSDDWTYEKNDTYWDAEKVKLTEAKVSVIKSPTTAVNLFDSNELDVVNKLSGEFIPGYVDNPAFLSIPQFVTYFLKMNSVRDGKENPALANNNIRKALAQAFDKESFVKEVLQDQSTATDQVIPPGQTIAPDGTDFTKLAAKKNNYLTYDTAKAKEFWEKGKKEIGLDKIKLEFLTDDTDSAKKAAEFFQFQLEENLDGLEVNVTQVPFTIRVDRDQTRDYDLELSGWGTDYRDPLTVMRIFTSDSTLGGVTFKSDTYDKLIQETRTTHAADQEARLNDFTQAQDILVNQETVLAPIYNRSISVLANQKIKDLYWHSFGPTYSLKWAYVN

SEQ ID NO: 401 - DNA, 1662 bp, Enterococcus faecalis
atgaagaaattaaaaatgttaggatgcgtcggtttgcttttagctttaacggcttgtcaggcgggaacgggaaactcggctgatagtaacaaagcagcggaacaaaaaattgcaattagttctgaagcggctatttcgacaatggaaccacacacagcgggggatacgacctcgactttagtcatgaatcaagtttatgaaggactctatgttttaggtaaagaagatgaattagagttgggggtcgctgccgaagaaccagcgatttctgaagatgaaaccgtttatacatttaagattagagaagatgccaaatggtcgaatgatgatccagtaacagcaaacgactttgtttatgcatggcaacaagttgcttcccctaaatcaggatcgattcatcaagctttattttttgatgtcattaaaaatgctaaggaaattgctttagaaggcgcagatgtgaatactcttggggttaaggcgctagatgataaaacgttagaaataactttagagcggcccaccccttatttgaaatcattgctttcgtttcctgttttgtttccgcaaaatgaaaaatatatcaaagaacaaggggataaatatgccactgatgcagaacatttgatttataatggtccttttaaattgaaagaatgggataatgcctcttccgatgactggacctacgaaaaaaatgatacgtattgggatgctgaaaaagttaaattaacagaagcgaaagtttcagtaattaagagcccaacgacagcggtgaatttgtttgactcgaatgaattggatgtagtgaataagctaagtggtgaatttattcctggttatgttgataatccagcctttctttcaattcctcaattcgtcacatactttttaaaaatgaacagcgttcgtgatggaaaagaaaatccggctttagcgaacaacaatattcgtaaagcgttggcacaagcttttgataaagaaagttttgtaaaagaagtcttgcaagatcaatcaacggctacagatcaagtaattcctccgggacaaacgattgcgccagatggaacagatttcacaaaactagctgctaagaaaaataactacttaacctacgatacagcgaaagcaaaagaattctgggaaaaagggaaaaaagaaattgggctggataaaatcaaattagaatttttaacagatgatacagacagcgccaaaaaagctgctgagtttttccaatttcaattggaagaaaatctagatggattagaagtgaatgttactcaagttccttttactattcgtgttgatcgtgatcaaacgagagactatgatttagaattatctggttggggaaccgattatcgtgatccattaacagttatgcgcatctttacttcggatagtaccttgggcggcgtaacgttcaagagtgatacgtatgatcaattaattcaagaaactagaacaacacatgcggctgatcaagaggctcgtttaaatgactttgctcaagcacaagatattttggtgaatcaggaaacggttttagcaccaatctacaatcgaagcatttctgtattagctaatcaaaaaatcaaggatctgtattggcattcatttggacctacgtacagtttaaaatgggcttatgttaactaa

SEQ ID NO: 402 - protein, 553 aa, Enterococcus faecalis; identical to SEQ ID NO: 72

SEQ ID NO: 403 - DNA, 1662 bp, Enterococcus faecalis; identical to SEQ ID NO: 52

SEQ ID NO: 404 - protein, 553 aa, Enterococcus faecalis; identical to SEQ ID NO: 72

SEQ ID NO: 405 - DNA, 1662 bp, Enterococcus faecalis
atgaagaaattaaaaatgttaggatgcgtcgggttgcttttagctttaacggcttgtcaggcgggaacgggaaactcggctgatagtaacaaagcagcggaacaaaaaattgcaattagttctgaagcggctatttcgacaatggaaccacacacagcgggggatacgacctcgactttagtcatgaatcaagtttatgaaggactctatgttttaggtaaagaagatgaattagagttgggggtcgctgccgaagaaccagcgatttctgaagatgaaaccgtttatacatttaagattagagaagatgccaaatggtcgaatgatgatccagtaacagcaaacgactttgtttatgcatggcaacaagttgcttcccctaaatcaggatcgattcatcaagctttattttttgatgtcattaaaaatgctaaggaaattgctttagaaggcgcagatgtgaatactcttggggttaaggcgctagatgataaaacgttagaaataactttagaacggcccaccccttatttgaaatctttgctttcgtttcctgttttgtttccccaaaatgaaaaatatatcaaagaacaaggggataaatatgccactgatgcagaacatttgatttataatggtccttttaaattgaaagaatgggataatgcctcttccgatgactggacctacgaaaaaaatgatacgtattgggatgctgaaaaagttaaattaacagaagcgaaagtttcagtaattaagagcccaacgacagcggtgaatttgtttgactcgaatgaattggatgtagtgaataagctaagtggtgaatttattcctggttatgttgataatccagcctttctttcaattcctcaattcgtcacatactttttaaaaatgaacagcgttcgtgatggaaaagaaaatccggctttagcgaacaacaatattcgtaaagcgttggcacaagcttttgataaagaaagttttgtaaaagaagtcttgcaagatcaatcaacggctacagatcaagtaattcctccgggacaaacgattgcgccagatggaacagatttcacaaaactagctgctaagaaaaataactacttaacctacgatacagcgaaagcaaaagaattctgggaaaaagggaaaaaagaaattgggctggataaaatcaaattagaatttttaacagatgatacagacagcgccaaaaaagctgctgagtttttccaatttcaattggaagaaaatctagatggattagaagtgaatgttactcaagttccttttactattcgtgttgatcgtgatcaaacgagagactatgatttagaattatctggttggggaaccgattatcgtgatccattaacagttatgcgcatctttacttcggatagtaccttgggcggcgtaacgttcaagagtgatacgtatgatcaattaattcaagaaactagaacaacacatgcggctgatcaagaggctcgtttaaatgactttgctcaagcacaagatattttggtgaatcaggaaacggttttagcaccaatctacaatcgaagcatttctgtattagctaatcaaaaaatcaaggatctgtattggcattcatttggacctacgtacagtttaaaatggggttatgttaactaa

SEQ ID NO: 406 - protein, 553 aa, Enterococcus faecalis
MKKLKMLGCVGLLLALTACQAGTGNSADSNKAAEQKIAISSEAAISTMEPHTAGDTTSTLVMNQVYEGLYVLGKEDELELGVAAEEPAISEDETVYTFKIREDAKWSNDDPVTANDFVYAWQQVASPKSGSIHQALFFDVIKNAKEIALEGADVNTLGVKALDDKTLEITLERPTPYLKSLLSFPVLFPQNEKYIKEQGDKYATDAEHLIYNGPFKLKEWDNASSDDWTYEKNDTYWDAEKVKLTEAKVSVIKSPTTAVNLFDSNELDVVNKLSGEFIPGYVDNPAFLSIPQFVTYFLKMNSVRDGKENPALANNNIRKALAQAFDKESFVKEVLQDQSTATDQVIPPGQTIAPDGTDFTKLAAKKNNYLTYDTAKAKEFWEKGKKEIGLDKIKLEFLTDDTDSAKKAAEFFQFQLEENLDGLEVNVTQVPFTIRVDRDQTRDYDLELSGWGTDYRDPLTVMRIFTSDSTLGGVTFKSDTYDQLIQETRTTHAADQEARLNDFAQAQDILVNQETVLAPIYNRSISVLANQKIKDLYWHSFGPTYSLKWGYVN

SEQ ID NO: 407 - DNA, 1662 bp, Enterococcus faecalis
atgaagaaattaaaaatgttaggatgcgtcggtttgcttttagctttaacggcttgtcaggcgggaacgggaaactcggctgatagtaacaaagcagcggaacaaaaaattgcaattagttctgaagcggctatttcgacaatggaaccacacacagcgggggatacgacctcgactttagtcatgaatcaagtttatgaaggactctatgttttaggtaaagaagatgaattagagttgggggtcgctgccgaagaaccagcgatttctgaagatgaaaccgtttatacatttaagattagagaagatgccaaatggtcgaatgatgatccagtaacagcaaacgactttgtttatgcatggcaacaagttgcttcccctaaatcaggatcgattcatcaagctttattttttgatgtcattaaaaatgctaaggaaattgctttagaaggcgcagatgtgaatactcttggggttaaggcgctagatgataaaacgttagaaataactttagaacggcccaccccctatttgaaatctttgctttcgtttcctgttttgtttccgcaaaatgaaaaatatatcaaagaacaaggggataaatatgccactgatgcagaacatttgatttataatggtccttttaaattgaaagaatgggataatgccttttctgatgactggacctacgaaaaaaatgatacgtattgggatgctgaaaaagttaaattaacagaagcgaaagtttcagtaattaagagcccaacgacagcggtgaatttgtttgactcgaatgaattggatgtagtgaataagctaagtggtgaatttattcctggttatgttgataatccagcctttctttcaattcctcaattcgtcacatactttttaaaaatgaacagcgttcgtgatggaaaagaaaatccggctttagcgaacaacaatattcgtaaagcgttggcacaagcttttgataaagaaagttttgtaaaagaagtcttgcaagatcaatcaacggctacagatcaagtaattccgccgggacaaacgattgcgccagatggaacagatttcacaaaactagctgctaagaaaaataactacttaacctacgatacagcgaaagcaaaagaattctgggaaaaagggaaaaaagaaattgggctggataaaatcaaattagaatttttaacagatgatacagacagcgccaaaaaagctgctgagtttttccaatttcaattggaagaaaatctagatggattagaagtgaatgttactcaagttccttttactattcgtgttgatcgtgatcaaacgagagactatgatttagaattatctggttggggaaccgattatcgtgatccattaacagttatgcgcatctttacttcggatagtaccttgggcggcgtaacgttcaagagtgatacgtatgatcaattaattcaagaaactagaacaacacatgcggctgatcaagaggctcgtttaaatgactttgctcaagcacaagatattttggtgaatcaggaaacggttttagcaccaatctacaatcgaagcatttctgtattagctaatcaaaaaatcaaggatctgtattggcattcatttggacctacgtacagtttaaaatgggcttatgttaactaa

SEQ ID NO: 408 - protein, 553 aa, Enterococcus faecalis
MKKLKMLGCVGLLLALTACQAGTGNSADSNKAAEQKIAISSEAAISTMEPHTAGDTTSTLVMNQVYEGLYVLGKEDELELGVAAEEPAISEDETVYTFKIREDAKWSNDDPVTANDFVYAWQQVASPKSGSIHQALFFDVIKNAKEIALEGADVNTLGVKALDDKTLEITLERPTPYLKSLLSFPVLFPQNEKYIKEQGDKYATDAEHLIYNGPFKLKEWDNAFSDDWTYEKNDTYWDAEKVKLTEAKVSVIKSPTTAVNLFDSNELDVVNKLSGEFIPGYVDNPAFLSIPQFVTYFLKMNSVRDGKENPALANNNIRKALAQAFDKESFVKEVLQDQSTATDQVIPPGQTIAPDGTDFTKLAAKKNNYLTYDTAKAKEFWEKGKKEIGLDKIKLEFLTDDTDSAKKAAEFFQFQLEENLDGLEVNVTQVPFTIRVDRDQTRDYDLELSGWGTDYRDPLTVMRIFTSDSTLGGVTFKSDTYDQLIQETRTTHAADQEARLNDFAQAQDILVNQETVLAPIYNRSISVLANQKIKDLYWHSFGPTYSLKWAYVN

SEQ ID NO: 409 - DNA, 1662 bp, Enterococcus faecalis; identical to SEQ ID NO: 383

SEQ ID NO: 410 - protein, 553 aa, Enterococcus faecalis; identical to SEQ ID NO: 384

SEQ ID NO: 411 - DNA, 1662 bp, Enterococcus faecalis
atgaagaaattaaaaatgttaggatgcgtcggtttgcttttagctttaacggcttgtcaggcgggaacgggaaactcggctgatagtaacaaagcagcggaacaaaaaattgcaattagttctgaagcggctatttcgacaatggaaccacacacagcgggggatacgacctcgactttagtcatgaatcaagtttatgaaggactctatgttttaggtaaagaagatgaattagagttgggggtcgctgccgaagaaccagcgatttctgaagatgaaaccgtttatacatttaagattagagaagatgccaaatggtcgaatgatgatccagtaacagcaaacgactttgtttatgcatggcaacaagttgcttcccctaaatcaggatcgattcatcaagctttattttttgatgtcattaaaaatgctaaggaaattgctttagaaggcgcagatgtgaatactcttggggttaagtcgctagatgataaaacgttagaaataactttagaacggcccaccccttatttgaaatctttgctttcgtttcctgttttgtttccacaaaatgaaaaatatatcaaagaacaaggggataaatatgccactgatgcagaacatttgatttataatggtccttttaaattgaaagaatgggataatgcctcttccgatgactggacctacgaaaaaaatgatacgtattgggatgctgaaaaagttaaattaacagaagcgaaagtttcagtaattaagagcccaacgacagcggtgaatttgtttgactcgaatgaattagatgtagtgaataagctaagtggtgaatttattcctggttatgttgataatccagcctttctttcaattcctcaattcgtcacatactttttaaaaatgaacagcgttcgtgatggaaaagaaaatccggctttagcgaacaacaatattcgtaaagcgttggcacaagcttttgataaagaaagttttgtaaaagaagtcttgcaagatcaatcaacggctacagatcaagtaattccgccgggacaaacgattgcgccagatggaacagatttcacaaaactagctgctaagaaaaataactacttaacctacgatacagcgaaagcaaaagaattctgggaaaaagggaaaaaagaaattgggctggataaaatcaaattagaatttttaacagatgatacagacagcgccaaaaaagctgctgagtttttccaatttcaattggaagaaaatctagacggattagaagtgaatgttactcaagttccttttactattcgtgttgatcgtgatcaaacgagagactatgatttagaattatctggttggggaaccgattatcgtgatccattaacagttatgcgcatctttacttcggatagtaccttgggcggcgtaacgttcaagagtgatacgtatgatcaattaattcaagagactagaacaacacatgcggctgatcaagaggctcgtttaaatgactttgctcaagcacaagatattttggtgaatcaggaaacggttttagcaccaatctacaatcgaagcatttctgtattagctaatcaaaaaatcaaggatctgtattggcattcatttggacctacgtacagtttaaaatgggcttatgttaactaa

SEQ ID NO: 412 - protein, 553 aa, Enterococcus faecalis; identical to SEQ ID NO: 368

SEQ ID NO: 413 - DNA, 1662 bp, Enterococcus faecalis
atgaagaaattaaaaatgttaggatgcgtcggtttgcttttagctttaacggcttgtcaggcgggaacgggaaactcggctgatagtaacaaagcagcggaacaaaaaattgcaattagttctgaagcggctatttcgacaatggaaccacacacagcgggggatacgacctcgactttagtcataaatcaagtttatgaaggactctatgttttaggtaaagaagatgaattagagttgggggtcgctgccgaagaaccagcgatttctgaagatgaaaccgtttatacatttaagattagagaagatgccaaatggtcgaatgatgatccagtaacagcaaacgactttgtttatgcatggcaacaagttgcttcccctaaatcaggatcgattcatcaagctttattttttgatgtcattaaaaatgctaaggaaattgctttagaaggcgcagatgtgaatactcttggggttaaggcgctagatgataaaacgttagaaataactttagaacggcccaccccttatttgaaatctttgctttcgtttcctgttttgtttccgcaaaatgaaaaatatatcaaagaacaaggggataaatatgccactgatgcagaacatttgatttataatggtccttttaaattgaaagaatgggataatgcctcttccgatgactggacctacgaaaaaaatgatacgtattgggatgctgaaaaagttaaattaacagaagcgaaagtttcagtaattaagagcccaacgacagcggtgaatttgtttgactcgaatgaattggatgtagtgaataagctaagtggtgaatttattcctggttatgttgataatccagcctttctttcaattcctcaattcgtcacatactttttaaaaatgaacagcgttcgtgatggaaaagaaaatccggctttagcgaacaacaatattcgtaaagcgttggcacaagcttttgataaagaaagttttgtaaaagaagtcttgcaagatcaatcaacggctacagatcaagtaattcctccgggacaaacgattgcgccagatggaacagatttcacaaaactagctgctaagaaaaataactacttaacctacgatacagcgaaagcaaaagaattctgggaaaaagggaaaaaagaaattgggctggataaaatcaaattagaatttttaacagatgatacagacagcgccaaaaaagctgctgagtttttccaatttcaattggaagaaaatctagatggattagaagtgaatgttactcaagttccttttactattcgtgttgatcgtgatcaaacgagagactatgatttagaattatctggttggggaaccgattatcgtgatccattaacagttatgcgcatctttacttcggatagtaccttgggcggcgtaacgttcaagagtgatacgtatgatcaattaattcaagaaactagaacaacacatgcggctgatcaagaggctcgtttaaatgactttgctcaagcacaagatattttggtgaatcaggaaacggttttagcaccaatctacaatcgaagcatttctgtattagctaatcaaaaaatcaaggatatgtattggcattcatttggacctacgtacagtttaaaatgggcttatgttaactaa

SEQ ID NO: 414 - protein, 553 aa, Enterococcus faecalis
MKKLKMLGCVGLLLALTACQAGTGNSADSNKAAEQKIAISSEAAISTMEPHTAGDTTSTLVINQVYEGLYVLGKEDELELGVAAEEPAISEDETVYTFKIREDAKWSNDDPVTANDFVYAWQQVASPKSGSIHQALFFDVIKNAKEIALEGADVNTLGVKALDDKTLEITLERPTPYLKSLLSFPVLFPQNEKYIKEQGDKYATDAEHLIYNGPFKLKEWDNASSDDWTYEKNDTYWDAEKVKLTEAKVSVIKSPTTAVNLFDSNELDVVNKLSGEFIPGYVDNPAFLSIPQFVTYFLKMNSVRDGKENPALANNNIRKALAQAFDKESFVKEVLQDQSTATDQVIPPGQTIAPDGTDFTKLAAKKNNYLTYDTAKAKEFWEKGKKEIGLDKIKLEFLTDDTDSAKKAAEFFQFQLEENLDGLEVNVTQVPFTIRVDRDQTRDYDLELSGWGTDYRDPLTVMRIFTSDSTLGGVTFKSDTYDQLIQETRTTHAADQEARLNDFAQAQDILVNQETVLAPIYNRSISVLANQKIKDMYWHSFGPTYSLKWAYVN

SEQ ID NO: 415 - DNA, 1662 bp, Enterococcus faecalis
atgaagaaattaaaaatgttaggatgcgtcggtttgcttttagctttaacggcttgtcaggcgggaacgggaaactcggctgatagtaacaaagcagcggaacaaaaaattgcaattagttctgaagcggctatttcgacaatggaaccacacacagcgggggatacgacctcgactttagtcatgaatcaagtttatgaaggactctatgttttaggtaaagaagacgagttagagttgggggtcgctgccgaagaaccagcgatttctgaagatgaaaccgtttatacatttaagattagagaagatgccaaatggtcgaatgatgatccagtaacagcaaatgactttgtttatgcatggcaacaagttgcttcccctaaatcagggtcgattcatcaagcgttattttttgatgtcattaaaaatgctaaggaaattgctttagaaggcgcagatgtgaatactcttggggttaaggcgctagatgataaaacgttagaaataactttagaacggcccaccccttatttgaaatcattactttcgtttcctgttttgtttccccaaaatgaaaaatatatcaaagaacaaggggataaatatgcccctgatgcagaacatttgatttataatggtccttttaaattgaaagaatgggataatgcctcttctgatgactggacctacgaaaaaaatgatacgtattgggatgctgaaaaagttaaattatcagaagcaaaagtttcagtaattaagagcccaacgacagcggtgaatttgtttgactcgaatgaattggatgtagtgaataagctaagtggtgaatttattcctggttatgttgataatccagcctttctttcaattcctcaattcgtcacatactttttaaaaatgaacagtgttcgtgatggaaaagaaaatccggctttagcgaacaacaatattcgtaaagcgttggcacaagcttttgataaagaaagttttgtaaaagaagtcttgcaagatcaatccacggctacagatcaagtaattccgccgggacaaacgattgcgccagatggaacagatttcacaaaactagctgctaagaaaaataactacttaacctacgatacagcgaaagcaaaagaattctgggaaaaagggaaaaaagaaattgggctggataaaatcaaattagaatttttaacagatgatacagacagcgccaaaaaagctgctgagtttttccaatttcaattggaagaaaatctagacggattagaagtgaatgttactcaagttccttttactattcgtgttgatcgtgatcaaacgagagactatgatttagaattatctggttggggaaccgattatcgtgatccattaacagttatgcgcatctttacttcggatagtaccttgggcggcgtaacgttcaagagtgatacgtatgatcaattaatccaagagactagaacaacacatgcggctgatcaagaggctcgtttaaatgactttgctcaagcacaagatattttggtgaatcaggaaacggttttagcaccaatctacaatcgaagcatttctgtattagctaatcaaaaaatcaaggatctgtattggcattcatttggacctacgtacagtttaaaatgggcttatgttaactaa

SEQ ID NO: 416 - protein, 553 aa, Enterococcus faecalis
MKKLKMLGCVGLLLALTACQAGTGNSADSNKAAEQKIAISSEAAISTMEPHTAGDTTSTLVMNQVYEGLYVLGKEDELELGVAAEEPAISEDETVYTFKIREDAKWSNDDPVTANDFVYAWQQVASPKSGSIHQALFFDVIKNAKEIALEGADVNTLGVKALDDKTLEITLERPTPYLKSLLSFPVLFPQNEKYIKEQGDKYAPDAEHLIYNGPFKLKEWDNASSDDWTYEKNDTYWDAEKVKLSEAKVSVIKSPTTAVNLFDSNELDVVNKLSGEFIPGYVDNPAFLSIPQFVTYFLKMNSVRDGKENPALANNNIRKALAQAFDKESFVKEVLQDQSTATDQVIPPGQTIAPDGTDFTKLAAKKNNYLTYDTAKAKEFWEKGKKEIGLDKIKLEFLTDDTDSAKKAAEFFQFQLEENLDGLEVNVTQVPFTIRVDRDQTRDYDLELSGWGTDYRDPLTVMRIFTSDSTLGGVTFKSDTYDQLIQETRTTHAADQEARLNDFAQAQDILVNQETVLAPIYNRSISVLANQKIKDLYWHSFGPTYSLKWAYVN

SEQ ID NO: 417 - DNA, 1662 bp, Enterococcus faecalis
atgaagaaattaaaaatgttaggatgcgtcggtttgcttttagctttaacggcttgtcaggcgggaacgggaaactcggctgatagtaacaaagcagcggaacaaaaaattgcaattagttctgaagcggctatttcgacaatggaaccacacacagcgggggatacgacctcgactttagtcatgaatcaagtttatgaaggactctatgttttaggtaaagaagatgaattagagttgggggtcgctgccgaagaaccagcgatttctgaagatgaaaccgtttatacatttaagattagagaagatgccaaatggtcgaatgatgatccagtaacagcaaacgactttgtttatgcatggcaacaagttgcttcccctaaatcaggatcgattcatcaagctttattttttgatgtcattaaaaatgctaaggaaattgctttagaaggcgcagatgtgaatactcttggggttaaggcgctagatgataaaacgttagaaataactttagaacggcccaccccttatttgaaatctttgctttcgtttcctgttttgtttccacaaaatgaaaaatatatcaaagaacaaggggataaatatgccactgatgcagaacatttgatttataatggtccttttaaattgaaagaatgggataatgccttttccgatgactggacctacgaaaaaaatgatacgtattgggatgctgaaaaagttaaattaacagaagcgaaagtttcagtaattaagagcccaacgacagcggtgaatttgtttgactcgaatgaattggatgtagtgaataagctaagtggtgaatttattcctggttatgttgataatccagcctttctttcaattcctcaattcgtcacatactttttaaaaatgaacagcgttcgtgatggaaaagaaaatccggctttagcgaacaacaatattcgtaaagcgttggcacaagcttttgataaagaaagttttgtaaaagaagtcttgcaagatcaatcaacggctacagatcaagtaattcctccgggacaaacgattgcgccagatggaacagatttcacaaaactagctgctaagaaaaataactacttaacctacgatacagcgaaagcaaaagaattctgggaaaaagggaaaaaagaaattgggctggataaaatcaaattagaatttttaacagatgatacagacagcgccaaaaaagctgctgagtttttccaatttcaattggaagaaaatctagatggattagaagtgaatgttactcaagttccttttactattcgtgttgatcgtgatcaaacgagagactatgatttagaattatctggttggggaaccgattatcgtgatccattaacagttatgcgcatctttacttcggatagtaccttgggcggcgtaacgttcaagagtgatacgtatgatcaattaattcaagaaactagaacaacacatgcggctgatcaagaggctcgtttaaatgactttgctcaagcacaagatattttggtgaatcaggaaacggttttagcaccaatctacaatcgaagcatttctgtattagctaatcaaaaaatcaaggatatgtattggcattcatttggacctacgtacagtttaaaatgggcttatgttaactaa

SEQ ID NO: 418 - protein, 553 aa, Enterococcus faecalis
MKKLKMLGCVGLLLALTACQAGTGNSADSNKAAEQKIAISSEAAISTMEPHTAGDTTSTLVMNQVYEGLYVLGKEDELELGVAAEEPAISEDETVYTFKIREDAKWSNDDPVTANDFVYAWQQVASPKSGSIHQALFFDVIKNAKEIALEGADVNTLGVKALDDKTLEITLERPTPYLKSLLSFPVLFPQNEKYIKEQGDKYATDAEHLIYNGPFKLKEWDNAFSDDWTYEKNDTYWDAEKVKLTEAKVSVIKSPTTAVNLFDSNELDVVNKLSGEFIPGYVDNPAFLSIPQFVTYFLKMNSVRDGKENPALANNNIRKALAQAFDKESFVKEVLQDQSTATDQVIPPGQTIAPDGTDFTKLAAKKNNYLTYDTAKAKEFWEKGKKEIGLDKIKLEFLTDDTDSAKKAAEFFQFQLEENLDGLEVNVTQVPFTIRVDRDQTRDYDLELSGWGTDYRDPLTVMRIFTSDSTLGGVTFKSDTYDQLIQETRTTHAADQEARLNDFAQAQDILVNQETVLAPIYNRSISVLANQKIKDMYWHSFGPTYSLKWAYVN

SEQ ID NO: 419 - DNA, 1662 bp, Enterococcus faecalis
atgaagaaattaaaaatgttaggatgcgtcggtttgcttttagctttaacggcttgtcaggcgggaacgggaaactcggctgatagtaacaaagcagcggaacaaaaaattgcaattagttctgaagcggctatttcgacaatggaaccacacacagcgggggatacgacctcgactttagtcatgaatcaagtttatgaaggactctatgttttaggtaaagaagatgaattagagttgggggtcgctgccgaagaaccagcgatttctgaagatgaaaccgtttatacatttaagattagagaagatgccaaatggtcgaatgatgatccagtaacagcaaacgactttgtttatgcatggcaacaagttgcttcccctaaatcaggatcgattcatcaagctttattttttgatgtcattaaaaatgctaaggaaattgctttagaaggcgcagatgtgaatactcttggggttaaggcgctagatgataaaacgttagaaataactttagaacggcccaccccttatttgaaatcattgctttcgtttcctgttttgtttccgcaaaatgaaaaatatatcaaagaacaaggggataaatatgccactgatgcagaacatttgatttataatggtccttttaaattgaaagaatgggataatgccttttctgatgactggacctacgaaaaaaatgatacgtattgggatgctgaaaaagttaaattaacagaagcgaaagtttcagtaattaagagcccaacgacagcggtgaatttgtttgactcgaatgaattggatgtagtgaataagctaagtggtgaatttattcctggttatgttgataatccagactttctttcaattcctcaattcgtcacatactttttaaaaatgaacagcgttcgtgatggaaaagaaaatccggctttagcgaacaacaatattcgtaaagcgttggcacaagcttttgataaagaaagttttgtaaaagaagtcttgcaagatcaatcaacggctacagatcaagtaattcctccgggacaaacgattgcgccagatggaacagatttcacaaaactagctgctaagaaaaataactacttaacctacgatacagcgaaagcaaaagaattctgggaaaaagggaaaaaagaaattgggctggataaaatcaaattagaatttttaacagatgatacagacagcgccaaaaaagctgctgagtttttccaatttcaattggaagaaaatctagatggattagaagtgaatgttactcaagttccttttactattcgtgttgatcgtgatcaaacgagagactatgatttagaattatctggttggggaaccgattatcgtgatccattaacagttatgcgcatctttacttcggatagtaccttgggcggcgtaacgttcaagagtgatacgtatgatcaattaattcaagaaactagaacaacacatgcggctgatcaagaggctcgtttaaatgactttgctcaagcacaagatattttggtgaatcaggaaacggttttagcaccaatctacaatcgaagcatttctgtattagctaatcaaaaaatcaaggatatgtattggcattcatttggacctacgtacagtttaaaatgggcttatgttaactaa

SEQ ID NO: 420 - protein, 553 aa, Enterococcus faecalis
MKKLKMLGCVGLLLALTACQAGTGNSADSNKAAEQKIAISSEAAISTMEPHTAGDTTSTLVMNQVYEGLYVLGKEDELELGVAAEEPAISEDETVYTFKIREDAKWSNDDPVTANDFVYAWQQVASPKSGSIHQALFFDVIKNAKEIALEGADVNTLGVKALDDKTLEITLERPTPYLKSLLSFPVLFPQNEKYIKEQGDKYATDAEHLIYNGPFKLKEWDNAFSDDWTYEKNDTYWDAEKVKLTEAKVSVIKSPTTAVNLFDSNELDVVNKLSGEFIPGYVDNPDFLSIPQFVTYFLKMNSVRDGKENPALANNNIRKALAQAFDKESFVKEVLQDQSTATDQVIPPGQTIAPDGTDFTKLAAKKNNYLTYDTAKAKEFWEKGKKEIGLDKIKLEFLTDDTDSAKKAAEFFQFQLEENLDGLEVNVTQVPFTIRVDRDQTRDYDLELSGWGTDYRDPLTVMRIFTSDSTLGGVTFKSDTYDQLIQETRTTHAADQEARLNDFAQAQDILVNQETVLAPIYNRSISVLANQKIKDMYWHSFGPTYSLKWAYVN

SEQ ID NO: 421 - DNA, 1662 bp, Enterococcus faecalis
atgaagaaattaaaaatgttaggatgcgtcggtttgcttttagctttaacggcttgtcaggcgggaacgggaaactcggctgatagtaacaaagcagcggaacaaaaaattgcaattagttctgaagcggctatttcgacaatggaaccacacacagcgggggatacgacctcgactttagtcatgaatcaagtttatgaaggactctatgttttaggtaaagaagatgaattagagttgggggtcgctgccgaagaaccagcgatttctgaagatgaaaccgtttatacatttaagattagagaagatgccaaatggtcgaatgatgatccagtaacagcaaacgactttgtttatgcatggcaacaagttgcttcccctaaatcaggatcgattcatcaagctttattttttgatgtcattaaaaatgctaaggaaattgctttagaaggcgcagatgtgaatactcttggggttaagtcgctagatgataaaacgttagaaataactttagaacggcccaccccttatttgaaatctttgctttcgtttcctgttttgtttccacaaaatgaaaaatatatcaaagaacaaggggataaatatgcccctgatgcagaacatttgatttataatggtccttttaaattgaaagaatgggataatgcctcttctgatgactggacctacgaaaaaaatgatacgtattgggatgctgaaaaagttaaattaacagaagcgaaagtttcagtaattaagagcccaacgacagcggtgaatttgtttgactcgaatgaattggatgtagtgaataagctaagtggtgaatttattcctggttatgttgataatccagcctttctttcaattcctcaattcgtcacatactttttaaaaatgaacagcgttcgtgatggaaaagaaaatccggctttagcgaacaacaatattcgtaaagcgttggcacaagcttttgataaagaaagttttgtaaaagaagtcttgcaagatcaatcaacggctacagatcaagtaattcctccgggacaaacgattgcgccagatggaacagatttcacaaaactagctgctaagaaaaataactacttaacctacgatacagcgaaagcaaaagaattctgggaaaaagggaaaaaagaaattgggctggataaaatcaaattagaatttttaacagatgatacagacagcgccaaaaaagctgctgagtttttccaatttcaattggaagaaaatctagatggattagaagtgaatgttactcaagttccttttactattcgtgttgatcgtgatcaaacgagagactatgatttagaattatctggttggggaaccgattatcgtgatccattaacagttatgcgcatctttacttcggatagtaccttgggcggcgtaacgttcaagagtgatacgtatgatcaattaattcaagaaactagaacaacacatgcggctgatcaagaggctcgtttaaatgactttgctcaagcacaagatattttggtgaatcaggaaacggttttagcaccaatctacaatcgaagcatttctgtattagctaatcaaaaaatcaaggatatgtattggcattcatttggacctacgtacagtttaaaatgggcttatgttaactaa

SEQ ID NO: 422 - protein, 553 aa, Enterococcus faecalis
MKKLKMLGCVGLLLALTACQAGTGNSADSNKAAEQKIAISSEAAISTMEPHTAGDTTSTLVMNQVYEGLYVLGKEDELELGVAAEEPAISEDETVYTFKIREDAKWSNDDPVTANDFVYAWQQVASPKSGSIHQALFFDVIKNAKEIALEGADVNTLGVKSLDDKTLEITLERPTPYLKSLLSFPVLFPQNEKYIKEQGDKYAPDAEHLIYNGPFKLKEWDNASSDDWTYEKNDTYWDAEKVKLTEAKVSVIKSPTTAVNLFDSNELDVVNKLSGEFIPGYVDNPAFLSIPQFVTYFLKMNSVRDGKENPALANNNIRKALAQAFDKESFVKEVLQDQSTATDQVIPPGQTIAPDGTDFTKLAAKKNNYLTYDTAKAKEFWEKGKKEIGLDKIKLEFLTDDTDSAKKAAEFFQFQLEENLDGLEVNVTQVPFTIRVDRDQTRDYDLELSGWGTDYRDPLTVMRIFTSDSTLGGVTFKSDTYDQLIQETRTTHAADQEARLNDFAQAQDILVNQETVLAPIYNRSISVLANQKIKDMYWHSFGPTYSLKWAYVN

SEQ ID NO: 423 - DNA, 1662 bp, Enterococcus faecalis
atgaagaaattaaaaatgttaggatgcgtcggtttgcttttagctttaactgcttgtcagacgggaacgggaaactcggctgatagtaacaaagcagcggaacaaaaaattgcaattagttctgaagcggctatttcgacaatggaaccacacacagcgggggatacgacctcgactttagtcatgaatcaagtttatgaaggactctatgttttaggtaaagaagatgaattagagttgggggtcgctgccgaagaaccagcgatttctgaagatgaaaccgtttatacatttaagattagagaagatgccaaatggtcgaatgatgatccagtaacagcaaatgactttgtttatgcatggcaacaagttgcttcccctaaatcaggatcgattcatcaagctttattttttgatgtcattaaaaatgctaaggaaattgctttagaaggcgcagatgtgaatactcttggggttaaggcgctagatgataaaacgttagaaataactttagaacggcccaccccttatttgaaatctttgctttcgtttcctgttttgtttccacaaaatgaaaaatatatcaaagaacaaggggataaatatgccactgatgcagaacatttgatttataatggtccttttaaattgaaagaatgggataatgcctcttccgatgactggacctacgaaaaaaatgatacgtattgggatgctgaaaaagttaaattaacagaagcgaaagtttcagtaattaagagcccaacgacagcggtgaatttgtttgactcgaatgaattggatgtagtgaataagctaagtggtgaatttattcctggttatgttgataatccagcctttctttcaattcctcaattcgtcacatactttttaaaaatgaacagcgttcgtgatggaaaagaaaatccggctttagcgaacaacaatattcgtaaagcgttggcacaagcttttgataaagaaagttttgtaaaagaagtcttgcaagatcaatcaacggctacagatcaagtaattcctccgggacaaacgattgcgccagatggaacagatttcacaaaactagctgctaagaaaaataactacttaacctacgatacagcgaaagcaaaagaattctgggaaaaagggaaaaaagaaattgggctggataaaatcaaattagaatttttaacagatgatacagacagcgccaaaaaagctgctgagtttttccaatttcaattggaagaaaatctagatggattagaagtgaatgttactcaagttccttttactattcgtgttgatcgtgatcaaacgagagactatgatttagaattatctggttggggaaccgattatcgtgatccattaacagttatgcgcatctttacttcggatagtaccttgggcggcgtaacgttcaagagtgatacgtatgatcaattaattcaagaaactagaacaacacatgcggctgatcaagaggctcgtttaaatgactttgctcaagcacaagatattttggtgaatcaggaaacggttttagcaccaatctacaatcgaagcatttctgtattagctaatcaaaaaatcaaggatctgtattggcattcatttggacctacgtacagtttaaaatgggcttatgttaactaa

SEQ ID NO: 424 - protein, 553 aa, Enterococcus faecalis
MKKLKMLGCVGLLLALTACQTGTGNSADSNKAAEQKIAISSEAAISTMEPHTAGDTTSTLVMNQVYEGLYVLGKEDELELGVAAEEPAISEDETVYTFKIREDAKWSNDDPVTANDFVYAWQQVASPKSGSIHQALFFDVIKNAKEIALEGADVNTLGVKALDDKTLEITLERPTPYLKSLLSFPVLFPQNEKYIKEQGDKYATDAEHLIYNGPFKLKEWDNASSDDWTYEKNDTYWDAEKVKLTEAKVSVIKSPTTAVNLFDSNELDVVNKLSGEFIPGYVDNPAFLSIPQFVTYFLKMNSVRDGKENPALANNNIRKALAQAFDKESFVKEVLQDQSTATDQVIPPGQTIAPDGTDFTKLAAKKNNYLTYDTAKAKEFWEKGKKEIGLDKIKLEFLTDDTDSAKKAAEFFQFQLEENLDGLEVNVTQVPFTIRVDRDQTRDYDLELSGWGTDYRDPLTVMRIFTSDSTLGGVTFKSDTYDQLIQETRTTHAADQEARLNDFAQAQDILVNQETVLAPIYNRSISVLANQKIKDLYWHSFGPTYSLKWAYVN

SEQ ID NO: 425 - DNA, 1662 bp, Enterococcus faecalis
atgaagaaattaaaaatgttaggatgcgtcggtttgcttttagctttaacggcttgtcaggcgggaacgggaaactcggctgatagtaacaaagtagcggaacaaaaaattgcaattagttctgaagcggctatttcgacaatggaaccacacacagcgggggatacgacctcgactttagtcatgaatcaagtttatgaaggactctatgttttaggtaaagaagatgaattagagttgggggtcgctgccgaagaaccagcgatttctgaagatgaaaccgtttatacatttaagattagagaagatgccaaatggtcgaatgatgatccagtaacagcaaacgactttgtttatgcatggcaacaagttgcttcccctaaatcagggtcgattcatcaagctttattttttgatgtcattaaaaatgctaaggaaattgctttagaaggcgcagatgtgaatactcttggggttaaggcgctagatgataaaacgttagaaataactttagagcggcctaccccttatttgaaatctttgctttcgtttcctgttttgtttccgcaaaatgaaaaatatatcaaagaacaaggggataaatatgccactgatgcagaacatttgatttataatggtccttttaaattgaaagaatgggataatgcctcttccgatgactggacctacgaaaaaaatgatacgtattgggatgctgaaaaagttaaattaacagaagcgaaagtttcagtaattaagagcccaacgacagcggtgaatttgtttgactcgaatgaattggatgtagtgaataagctaagtggtgaatttattcctggttatgttgataatccagcctttctttcaattcctcaattcgtcacatactttttaaaaatgaacagcgttcgtgatggaaaagaaaatccggctttagcgaacaacaatattcgtaaagcgttggcacaagcttttgataaagaaagttttgtaaaagaagtcttgcaagatcaatcaacggctacagatcaagtaattcctccgggacaaacgattgcgccagatggaacagatttcacaaaactagctgctaagaaaaataactacttaacctacgatacagcgaaagcaaaagaattctgggaaaaagggaaaaaagaaattgggctggataaaatcaaattagaatttttaacagatgatacagacagcgccaaaaaagctgctgagtttttccaatttcaattggaagaaaatctagatggattagaagtgaatgttactcaagttccttttactattcgtgttgatcgtgatcaaacgagagactatgatttagaattatctggttggggaaccgattatcgtgatccattaacagttatgcgcatctttacttcggatagtaccttgggcggcgtaacgttcaagagtgatacgtatgatcaattaattcaagaaactagaacaacacatgcggctgatcaagaggctcgtttaaatgactttgctcaagcacaagatattttggtgaatcaggaaacggttttagcaccaatctacaatcgaagcatttctgtattagctaatcaaaaaatcaaggatctgtattggcattcatttggacccacgtacagtttaaaatgggcttatgttaactaa

SEQ ID NO: 426 - protein, 553 aa, Enterococcus faecalis; identical to SEQ ID NO: 394

SEQ ID NO: 427 - DNA, 1407 bp, Enterococcus faecalis
atgaagaaattaaaaatgttaggatgcgtcggtttgcttttagctttaacggcttgtcaggcgggaacgggaaactcggctgatagtaacaaagcagcggaacaaaaaattgcaattagttctgaagcggctatttcgacaatggaaccacacacagcgggggatacgacctcgactttagtcatgaatcaagtttatgaaggactctatgttttaggtaaagaagatgaattagagttgggggtcgctgccgaagaaccagcgatttctgaagatgaaaccgtttatacatttaagattagagaagatgccaaatggtcgaatgatgatccagtaacagcaaacgactttgtttatgcatggcaacaagttgcttcccctaaatcaggatcgattcatcaagctttattttttgatgtcattaaaaatgctaaggaaattgctttagaaggcgcagatgtgaatactcttggggttaagtcgctagatgataaaacgttagaaataactttagaacggcccaccccttatttgaaatctttgctttcgtttcctgttttgtttccacaaaatgaaaaatatatcaaagaacaaggggataaatatgccactgatgcagaacatttgatttataatggtccttttaaattgaaagaatgggataatgcctcttccgatgactggacctacgaaaaaaatgatacgtattgggatgctgaaaaagttaaattaacagaagcgaaagtttcagtaattaagagcccaacgacagcggtgaatttgtttgactcgaatgaattggatgtagtgaataagctaagtggtgaatttattcctggttatgttgataatccagcctttctttcaattcctcaattcgtcacatactttttaaaaatgaacagcgttcgtgatggaaaagaaaatccggctttagcgaacaacaatattcgtaaagcgttggcacaagcttttgataaagaaagttttgtaaaagaagtcttgcaagatcaatcaacggctacagatcaagtaattcctccgggacaaacgattgcgccagatggaacagatttcacaaaactagctgctaagaaaaataactacttaacctacgatacagcgaaagcaaaagaattctgggaaaaagggaaaaaagaaattgggctggataaaatcaaattagaatttttaacagatgatacagacagcgccaaaaaagctgctgagtttttccaatttcaattggaagaaaatctagatggattagaagtgaatgttactcaagttccttttactattcgtgttgatcgtgatcaaacgagagactatgatttagaattatctggttggggaaccgattatcgtgatccattaacaagttatgcgcatctttacttcggatag

SEQ ID NO: 428 - protein, 468 aa, Enterococcus faecalis
MKKLKMLGCVGLLLALTACQAGTGNSADSNKAAEQKIAISSEAAISTMEPHTAGDTTSTLVMNQVYEGLYVLGKEDELELGVAAEEPAISEDETVYTFKIREDAKWSNDDPVTANDFVYAWQQVASPKSGSIHQALFFDVIKNAKEIALEGADVNTLGVKSLDDKTLEITLERPTPYLKSLLSFPVLFPQNEKYIKEQGDKYATDAEHLIYNGPFKLKEWDNASSDDWTYEKNDTYWDAEKVKLTEAKVSVIKSPTTAVNLFDSNELDVVNKLSGEFIPGYVDNPAFLSIPQFVTYFLKMNSVRDGKENPALANNNIRKALAQAFDKESFVKEVLQDQSTATDQVIPPGQTIAPDGTDFTKLAAKKNNYLTYDTAKAKEFWEKGKKEIGLDKIKLEFLTDDTDSAKKAAEFFQFQLEENLDGLEVNVTQVPFTIRVDRDQTRDYDLELSGWGTDYRDPLTSYAHLYFG

SEQ ID NO: 429 - DNA, 1407 bp, Enterococcus faecalis; identical to SEQ ID NO: 427

SEQ ID NO: 430 - protein, 468 aa, Enterococcus faecalis; identical to SEQ ID NO: 428

SEQ ID NO: 431 - DNA, 1662 bp, Enterococcus faecalis
atgaagaaattaaaaatgttaggatgcgtcggtttgcttttagctttaacggcttgtcaggcgggaacgggaaactcggttgatagtaacaaagcagcggaacaaaaaattgcaattagttctgaagcggctatttcgacaatggaaccgcacacagcgggggatactacctcgactttagtcatgaatcaagtttatgaaggactctatgttttaggtaaggaagacgaattagagttgggggtcgctgccgaagaaccagcgatttctgaagatgaaaccgtttatacatttaagattagagaagatgccaaatggtcgaacgatgatccagtgacagcaaacgactttgtttatgcatggcaacaagttgcttcccctaaatcagggtcgattcatcaagctttattttttgatgtcattaaaaatgctaaggaaattgctttagaaggcgcagatgtgaatactcttggggttaaggcgctagatgataaaacattagaaataactttagaacggcctaccccttatttgaaatcattactttcgtttcctgttttgtttccacaaaatgaaaaatatatcaaagaacaaggggataaatatgccactgatgcagaacatttgatttataatggtccttttaaattgaaagaatgggataacgcctcttccgatgattggacctacgaaaaaaatgatacgtattgggatgctgaaaaagttaaattaacagaagcaaaagtttcagtaattaagagcccaacgacagcggtgaatttgtttgactcgaatgaattggatgtagtgaataagctaagtggtgaatttattcctggttatgttgataatccagcctttctttcgattcctcaattcgtcacatactttttaaaaatgaacagtgttcgtgatggaaaagaaaatccggctctagcgaacaacaatattcgtaaagcgttggcacaagcttttgataaagaaagttttgtaaaagaagtcttgcaagatcaatccacggctacagatcaagtaattccgccgggacaaacgattgcaccagatggaactgatttcacaaaactagctgctaagaaaaataactacttaacctacgatacagcgaaagcaaaagaattctgggaaaaagggaaaaaagaaattgggctggctaaaatcaaattagaatttttaacagatgatacagacagcgccaaaaaagctgctgagtttttccaatttcaattggaagaaaatctagatggattagaagtgaatgttactcaagttccttttactattcgtgttgatcgtgatcaaacgagagactatgatttagaattatctggttggggaaccgattatcgtgatccattaacggttatgcgcatctttacttcggatagtaccttgggcggcgtaacgttcaagagtgacacgtatgatcaattaattcaagaaactagaacaacacatgcggctgatcaagaggctcgtttaaatgactttgctcaagcacaagatattttggtgaatcaggaaacgattttagcaccaatctacaatcgaagcatttctgtattagctaatcaaaaaatcaaggatctgtattggcattcatttggacctacgtacagtttaaaatgggcctatgttaactaa

SEQ ID NO: 432 - protein, 553 aa, Enterococcus faecalis
MKKLKMLGCVGLLLALTACQAGTGNSVDSNKAAEQKIAISSEAAISTMEPHTAGDTTSTLVMNQVYEGLYVLGKEDELELGVAAEEPAISEDETVYTFKIREDAKWSNDDPVTANDFVYAWQQVASPKSGSIHQALFFDVIKNAKEIALEGADVNTLGVKALDDKTLEITLERPTPYLKSLLSFPVLFPQNEKYIKEQGDKYATDAEHLIYNGPFKLKEWDNASSDDWTYEKNDTYWDAEKVKLTEAKVSVIKSPTTAVNLFDSNELDVVNKLSGEFIPGYVDNPAFLSIPQFVTYFLKMNSVRDGKENPALANNNIRKALAQAFDKESFVKEVLQDQSTATDQVIPPGQTIAPDGTDFTKLAAKKNNYLTYDTAKAKEFWEKGKKEIGLAKIKLEFLTDDTDSAKKAAEFFQFQLEENLDGLEVNVTQVPFTIRVDRDQTRDYDLELSGWGTDYRDPLTVMRIFTSDSTLGGVTFKSDTYDQLIQETRTTHAADQEARLNDFAQAQDILVNQETILAPIYNRSISVLANQKIKDLYWHSFGPTYSLKWAYVN

SEQ ID NO: 433 - DNA, 1662 bp, Enterococcus faecalis
atgaagaaattaaaaatgttaggatgcgtcggtttgcttttagctttaacggcttgtcaggcgggaacgggaaactcggctgatagtaacaaagtagcggaacaaaaaattgcaattagttctgaagcggctatttcgacaatggaaccacacacagcgggggatacgacctcgactttagtcatgaatcaagtttatgaaggactctatgttttaggtaaagaagatgaattagagttgggggtcgctgccgaagaaccagcgatttctgaagatgaaaccgtttatacatttaagattagagaagatgccaaatggtcgaatgatgatccagtaacagcaaatgactttgtttatgcatggcaacaagttgcttcccctaaatcagggtcgattcatcaagcgttattttttgatgtcattaaaaatgctaaggaaattgctttagaaggcgcagatgtgaatactcttggggttaaggcgctagatgataaaacgttagaaataactttagagcggcccaccccctatttgaaatcattactttcgtttcctgttttgtttccacaaaatgaaaaatatatcaaagaacaaggggataaatatgccactgatgcagaacatttgatttataatggtccttttaaattgaaagaatgggataatgcctcttctgatgactggacctacgaaaaaaatgatacgtattgggatgctgaaagagttaaattaacagaagcgaaagtttcagtaattaagagcccaacgacagcggtgaatttgtttgactcgaatgaattggatgtagtgaataagctaagtggtgaatttatacctggttatgttgataatccagcctttctttcaattcctcaattcgtcacatactttttaaaaatgaacagtgttcgtgatggaaaagaaaatccggctttagcgaacaacaatattcgtaaagcgttggcacaagcttttgataaagaaagttttgtaaaagaagtcttgcaagatcaatccacggctacagatcaagtaattccgccagggcaaacgattgcgccagatggaacagatttcacaaaactagctgctaagaaaaatagctacttaacctacgatacagcgaaagcaaaagaattctgggaaaaagggaaaaaagaaattgggctggataaaatcaaattagaatttttaacagatgatacagacagcgccaaaaaagctgctgagtttttccaatttcaattggaagaaaatctagatggattagaagtgaatgttactcaagttccttttactattcgtgttgatcgtgatcaaacgagagactatgatttagaattatctggttggggaaccgattatcgtgatccattaacagttatgcgcatctttacttcggatagtaccttgggcggcgtaacgttcaagagtgatacgtatgatcaattaatccaagagactagaacaacacatgcggctgatcaagaggctcgtttaaatgactttgctcaagcacaagatattttggtgaatcaggaaacggttttagcaccaatctacaatcgaagcatttctgtattagctaatcaaaaaatcaaggatctgtattggcattcatttggacctacgtacagtttaaaatgggcttatgttaactaa

SEQ ID NO: 434 - protein, 553 aa, Enterococcus faecalis
MKKLKMLGCVGLLLALTACQAGTGNSADSNKVAEQKIAISSEAAISTMEPHTAGDTTSTLVMNQVYEGLYVLGKEDELELGVAAEEPAISEDETVYTFKIREDAKWSNDDPVTANDFVYAWQQVASPKSGSIHQALFFDVIKNAKEIALEGADVNTLGVKALDDKTLEITLERPTPYLKSLLSFPVLFPQNEKYIKEQGDKYATDAEHLIYNGPFKLKEWDNASSDDWTYEKNDTYWDAERVKLTEAKVSVIKSPTTAVNLFDSNELDVVNKLSGEFIPGYVDNPAFLSIPQFVTYFLKMNSVRDGKENPALANNNIRKALAQAFDKESFVKEVLQDQSTATDQVIPPGQTIAPDGTDFTKLAAKKNSYLTYDTAKAKEFWEKGKKEIGLDKIKLEFLTDDTDSAKKAAEFFQFQLEENLDGLEVNVTQVPFTIRVDRDQTRDYDLELSGWGTDYRDPLTVMRIFTSDSTLGGVTFKSDTYDQLIQETRTTHAADQEARLNDFAQAQDILVNQETVLAPIYNRSISVLANQKIKDLYWHSFGPTYSLKWAYVN

SEQ ID NO: 435 - DNA, 1407 bp, Enterococcus faecalis; identical to SEQ ID NO: 427

SEQ ID NO: 436 - protein, 468 aa, Enterococcus faecalis; identical to SEQ ID NO: 428

SEQ ID NO: 437 - DNA, 1662 bp, Enterococcus faecalis; identical to SEQ ID NO: 52

SEQ ID NO: 438 - protein, 553 aa, Enterococcus faecalis; identical to SEQ ID NO: 72

SEQ ID NO: 439 - DNA, 1662 bp, Enterococcus faecalis; identical to SEQ ID NO: 52

SEQ ID NO: 440 - protein, 553 aa, Enterococcus faecalis; identical to SEQ ID NO: 72

SEQ ID NO: 441 - DNA, 483 bp, Enterococcus faecalis
atgaacatttttgctatccgtttaaaagaagctttaacagccaagaacatcaaacctagtgaattagcgaaaaaaactggcatcggtaaatcttcgatcagcgattggctagctggtcgttacgaagcaaaacaagacaaagtttatcgcattgcagatgcattagacattaatgaggcctggttgatgggacaagaagttcccatggaaaaaaatgcctcaactatcgaccgcatttataaaaaattagagccccaacgacaagccatcgtttatcaatttgccgaacaacaattacacgaacaacaaacgcaagcagaaattctctcattccctcgccgtgacgaaatgacactggctgcccacgctggggatccagaaaagatattttcaaaagaagaaatcgagaaaattcacgattacttggatgaaattgatgccaaatatcaacaatcgatttcttctgacaaaaaagaggattaa

SEQ ID NO: 442 - protein, 160 aa, Enterococcus faecalis
MNIFAIRLKEALTAKNIKPSELAKKTGIGKSSISDWLAGRYEAKQDKVYRIADALDINEAWLMGQEVPMEKNASTIDRIYKKLEPQRQAIVYQFAEQQLHEQQTQAEILSFPRRDEMTLAAHAGDPEKIFSKEEIEKIHDYLDEIDAKYQQSISSDKKED

SEQ ID NO: 443 - DNA, 483 bp, Enterococcus faecalis
atgaacatttttgctgtccgtttaaaagaggctttaacagccaagaacatcaaacctagtgatttagcgaaaaaaactggcatcggtaaatcttcgatcagcgattggctagctggtcgttacgaagcaaaacaagacaaagtttatcgcattgcagatgcattagacattaatgaggcctggttgatgggacaagaagttcccatggaaaaaaatgcctcaactatcgaccgcatttataaaaaattagaaccccaacgacaagccatcgtttatcaatttgccgaacaacaattacacgaacaacaaacgcaagcagaaattctctcattccctcgccgtgacgaaatgacactggctgcccacgctggggatccagaaaagatattttcaaaagaagaaatcgagaaaattcacgattacttggatgaaattgatgccaaatatcaacaatcaatttcttctgacaaaaaagaggattaa

SEQ ID NO: 444 - protein, 160 aa, Enterococcus faecalis; identical to SEQ ID NO: 30

SEQ ID NO: 445 - DNA, 483 bp, Enterococcus faecalis
atgaacatttttgctgtccgtttaaaagaggctttaacagccaagaacatcaaacctagtgatttagcgaaaaaaactggcatcggtaaatcttcgatcagcgattggctagctggtcgttacgaagcaaaacaagacaaagtttatcgcattgcagatgcattagacattaatgaggcctggttgatgggacaagaagttcccatggaaaaaaatgcctcaactatcgaccgcatttataaaaaattagaaccccaacgacaagccatcgtttatcaatttgccgaacaacaattacacgaacaacaaacgcaagcagaaattctctcattccctcgccgtgacgaaatgacactggctgcccacgctggggatccagaaaagatattttcaaaagaagaaatcgagaaaattcacgattacttggatgaaattgatgccaaatatcaacaatcgatttcttctgacaaaaaagaggattaa

SEQ ID NO: 446 - protein, 160 aa, Enterococcus faecalis; identical to SEQ ID NO: 30

SEQ ID NO: 447 - DNA, 483 bp, Enterococcus faecalis
atgaacatttttactatccgtttaaaagaggctttaacagccaagaacatcaaacctagtgaattagcgaaaaaaactggcatcggtaaatcttcgatcagcgattggctagctggtcgttacgaagcaaaacaagacaaagtttatcgcattgcagatgcattagatattaatgaggcctggttgatgggacaagaggttcccatggaaaaaaatgcctcaactatcgaccgcatttataaaaaattagagccccaacgacaagccatcgtttatcaatttgccgaacaacaattacacgaacaacaaacgcaagcagaaattctctcattccctcgccgtgacgaaatgacactggctgctcacgctggggatccagaaaagatattttcaaaagaagaaatcgagaaaattcacgattacttggatgaaattgatgccaaatatcaacaatcgatttcttctgacaaaaaagaggattaa

SEQ ID NO: 448 - protein, 160 aa, Enterococcus faecalis
MNIFTIRLKEALTAKNIKPSELAKKTGIGKSSISDWLAGRYEAKQDKVYRIADALDINEAWLMGQEVPMEKNASTIDRIYKKLEPQRQAIVYQFAEQQLHEQQTQAEILSFPRRDEMTLAAHAGDPEKIFSKEEIEKIHDYLDEIDAKYQQSISSDKKED

SEQ ID NO: 449 - DNA, 483 bp, Enterococcus faecalis; identical to SEQ ID NO: 447

SEQ ID NO: 450 - protein, 160 aa, Enterococcus faecalis; identical to SEQ ID NO: 448

SEQ ID NO: 451 - DNA, 483 bp, Enterococcus faecalis; identical to SEQ ID NO: 54

SEQ ID NO: 452 - protein, 160 aa, Enterococcus faecalis; identical to SEQ ID NO: 30

SEQ ID NO: 453 - DNA, 483 bp, Enterococcus faecalis
atgaacatttttgctatccgtttaaaagaggctttaacagccaagaacatcaaacctagtgatttagcgaaaaaaactggcatcggtaaatcttcaatcagcgattggctagctggtcgttacgaagcaaaacaagacaaagtttatcgcattgcagatgcattagacattaatgaggcctggttgatggggcaagaagttcccatggaaaaaaatgcctcaactatcgaccgcatttataaaaaattagagccccaacgacaagccatcgtttatcaatttgccgaacaacaattacacgaacaacaaacgcaagcagaaattctctcattccctcgccgtgacgaaatgacactggctgcccacgctggggatccagaaaagatattttcaaaagaagaaatcgagaaaattcacgattacttggatgaaattgatgccaaatatcaacaatcgatttcttctgacaaaaaagaggattaa

SEQ ID NO: 454 - protein, 160 aa, Enterococcus faecalis
MNIFAIRLKEALTAKNIKPSDLAKKTGIGKSSISDWLAGRYEAKQDKVYRIADALDINEAWLMGQEVPMEKNASTIDRIYKKLEPQRQAIVYQFAEQQLHEQQTQAEILSFPRRDEMTLAAHAGDPEKIFSKEEIEKIHDYLDEIDAKYQQSISSDKKED

SEQ ID NO: 455 - DNA, 483 bp, Enterococcus faecalis
atgaacatttttgctgtccgtttaaaagaggctttaacagccaagaacatcaaacctagtgatttagcgaaaaaaactggcatcggtaaatcttcaatcagcgattggctagctggtcgttacgaagcaaaacaagacaaagtttatcgcattgcagatgcattagacattaatgaggcctggttgatgggacaagaagttcccatggaaaaaaatgcctcaactatcgaccgcatttataaaaaattagaaccccaacgacaagccatcgtttatcaatttgccgaacaacaattacacgaacaacaaacgcaagcagaaattctctcattccctcgccgtgacgaaatgacactggctgcccacgctggggatccagaaaagatattttcaaaagaagaaatcgagaaaattcacgattacttggatgaaattgatgccaaatatcaacaatcgatttcttctgacaaaaaagaggattaa

SEQ ID NO: 456 - protein, 160 aa, Enterococcus faecalis; identical to SEQ ID NO: 30

SEQ ID NO: 457 - DNA, 483 bp, Enterococcus faecalis; identical to SEQ ID NO: 455

SEQ ID NO: 458 - protein, 160 aa, Enterococcus faecalis; identical to SEQ ID NO: 30

SEQ ID NO: 459 - DNA, 483 bp, Enterococcus faecalis; identical to SEQ ID NO: 441

SEQ ID NO: 460 - protein, 160 aa, Enterococcus faecalis; identical to SEQ ID NO: 442

SEQ ID NO: 461 - DNA, 483 bp, Enterococcus faecalis; identical to SEQ ID NO: 455

SEQ ID NO: 462 - protein, 160 aa, Enterococcus faecalis; identical to SEQ ID NO: 30

SEQ ID NO: 463 - DNA, 483 bp, Enterococcus faecalis
atgaacatttttgctgtccgtttaaaagaggctttaacagccaagaacatcaaacctagtgaattagcgaaaaaaactggcatcggtaaatcttcgatcagcgattggctagctggtcgttacgaagcaaaacaagacaaagtttatcgcattgcagatgcattagacattaatgaggcctggttgatgggacaagaggttcccatggaaaaaaatgcctcaactatcgaccgcatttataaaaaattagagccccaacgacaagccatcgtttatcaatttgccgaacaacaattacacgaacaacaaacgcaagcagaaattctctcattccctcgccgtgacgaaatgacactggctgcccacgctggggatccagaaaagatattttcaaaagaagaaatcgagaaaattcacgattacttggatgaaattgatgccaaatatcaacaatcgatttcttctgacaaaaaagaggattaa

SEQ ID NO: 464 - protein, 160 aa, Enterococcus faecalis
MNIFAVRLKEALTAKNIKPSELAKKTGIGKSSISDWLAGRYEAKQDKVYRIADALDINEAWLMGQEVPMEKNASTIDRIYKKLEPQRQAIVYQFAEQQLHEQQTQAEILSFPRRDEMTLAAHAGDPEKIFSKEEIEKIHDYLDEIDAKYQQSISSDKKED

SEQ ID NO: 465 - DNA, 483 bp, Enterococcus faecalis
atgaacatttttgctatccgtttaaaagaggctttaacagccaagaacatcaaacctagtgatttagcgaaaaaaactggcatcggtaaatcttcgatcagcgattggctagctggtcgttacgaagcaaaacaagacaaagtttatcgcattgcagatgcattagacattaatgaggcttggttgatgggacaagaggttcccatggaaaaaaatgcctcaactatcgaccgcatttataaaaaattagaaccccaacgacaagccatcgtttatcaatttgccgaacaacaattacacgaacaacaaacgcaagcagaaattctctcattccctcgccgtgacgaaatgacactggctgcccacgctggggatccagaaaagatattttcaaaagaagaaatcgagaaaattcacgattacttggatgaaattgatgccaaatatcaacaatcgatttcttctgacaaaaaagaggattaa

SEQ ID NO: 466 - protein, 160 aa, Enterococcus faecalis; identical to SEQ ID NO: 454

SEQ ID NO: 467 - DNA, 483 bp, Enterococcus faecalis
atgaacatttttgctatccgtttaaaagaggctttaacagccaagaacatcaaacctagtgatttagcgaaaaaaactggcatcggtaaatcttcgatcagcgattggctagctggtcgttacgaagcaaaacaagacaaagtttatcgcattgcagatgcattagacattaatgaggcctggttgatgggacaagaagttcccatggaaaaaaatgcctcaactatcgaccgcatttataaaaaattagaaccccaacgacaagccatcgtttatcaatttgccgaacaacaattacacgaacaacaaacgcaagcagaaattctctcattccctcgccgtgacgaaatgacactggctgcccacgctggggatccagaaaagatattttcaaaagaagaaatcgagaaaattcacgattacttggatgaaattgatgccaaatatcaacaatcgatttcttctgacaaaaaagaggattaa

SEQ ID NO: 468 - protein, 160 aa, Enterococcus faecalis; identical to SEQ ID NO: 454

SEQ ID NO: 469 - DNA, 483 bp, Enterococcus faecalis; identical to SEQ ID NO: 447

SEQ ID NO: 470 - protein, 160 aa, Enterococcus faecalis; identical to SEQ ID NO: 448

SEQ ID NO: 471 - DNA, 483 bp, Enterococcus faecalis; identical to SEQ ID NO: 447

SEQ ID NO: 472 - protein, 160 aa, Enterococcus faecalis; identical to SEQ ID NO: 448

SEQ ID NO: 473 - DNA, 483 bp, Enterococcus faecalis
atgaacatttttgctgtccgtttaaaagaggctttaacagccaagaacatcaaacctagtgatttagcgaaaaaaactggcatcggtaaatcttcgatcagcgattggctagctggtcgttacgaagcaaaacaagacaaagtttatcgcattgcagatgcattagacattaatgaggcctggttgatgggacaagaggttcccatggaaaaaaatgcctcaactatcgaccgcatttataaaaaattagagccccaacgacaagccatcgtttatcaatttgccgaacaacaattacacgaacaacaaacgcaagcagaaattctctcattccctcgccgtgacgaaatgacactggctgcccacgctggggatccagaaaagatattttcaaaagaagaaatcgagaaaattcacgattacttggatgaaattgatgccaaatatcaacaatcgatttcttctgacaaaaaagaggattaa

SEQ ID NO: 474 - protein, 160 aa, Enterococcus faecalis; identical to SEQ ID NO: 30

SEQ ID NO: 475 - DNA, 483 bp, Enterococcus faecalis; identical to SEQ ID NO: 441

SEQ ID NO: 476 - protein, 160 aa, Enterococcus faecalis; identical to SEQ ID NO: 442

SEQ ID NO: 477 - DNA, 483 bp, Enterococcus faecalis; identical to SEQ ID NO: 54

SEQ ID NO: 478 - protein, 160 aa, Enterococcus faecalis; identical to SEQ ID NO: 30

SEQ ID NO: 479 - DNA, 483 bp, Enterococcus faecalis; identical to SEQ ID NO: 465

SEQ ID NO: 480 - protein, 160 aa, Enterococcus faecalis; identical to SEQ ID NO: 454

SEQ ID NO: 481 - DNA, 483 bp, Enterococcus faecalis; identical to SEQ ID NO: 447

SEQ ID NO: 482 - protein, 160 aa, Enterococcus faecalis; identical to SEQ ID NO: 448

SEQ ID NO: 483 - DNA, 483 bp, Enterococcus faecalis
atgaacatttttgctatccgtttaaaagaggctttaacagccaagaacatcaaacctagtgatttagcgaaaaaaactggcatcggtaaatcttcgatcagcgattggctagctggtcgttacgaagcaaaacaagacaaagtttatcgcattgcagatgcattagatattaatgaggcctggttgatgggacaagaggttcccatggaaaaaaatgcctcaactatcgaccgcatttataaaaaattagaaccccaacgacaagccatcgtttatcaatttgccgaacaacaattacacgaacaacaaacgcaagcagaaattctctcattccctcgccgtgacgaaatgacactggctgctcacgctggggatccagaaaagatattttcaaaagaagaaatcgagaaaattcacgattacttggatgaaattgatgccaaatatcaacaatcgatttcttctgacaaaaaagaggattaa

SEQ ID NO: 484 - protein, 160 aa, Enterococcus faecalis; identical to SEQ ID NO: 454

SEQ ID NO: 485 - DNA, 483 bp, Enterococcus faecalis
atgaacatttttgctatccgtttaaaagaggctttaacagccaagaacatcaaacctagtgaattagcgaaaaaaactggtatcggtaaatcttcaatcagcgattggctagctggtcgttacgaagcaaaacaagacaaagtttatcgcattgcagatgcattagacattaatgaggcctggttgatgggacaagaagttcccatggaaaaaaatgcctcaactatcgaccgcatttataaaaaattagagccccaacgacaagccatcgtttatcaatttgccgaacaacaattacacgaacaacaaacgcaagcagaaattctctcattccctcgccgtgacgaaatgacactggctgcccacgctggggatccagaaaagatattttcaaaagaagaaatcgagaaaattcacgattacttggatgaaattgatgccaaatatcaacaatcgatttcttctgacaaaaaagaggattaa

SEQ ID NO: 486 - protein, 160 aa, Enterococcus faecalis; identical to SEQ ID NO: 442

SEQ ID NO: 487 - DNA, 483 bp, Enterococcus faecalis; identical to SEQ ID NO: 445

SEQ ID NO: 488 - protein, 160 aa, Enterococcus faecalis; identical to SEQ ID NO: 30

SEQ ID NO: 489 - DNA, 483 bp, Enterococcus faecalis; identical to SEQ ID NO: 445

SEQ ID NO: 490 - protein, 160 aa, Enterococcus faecalis; identical to SEQ ID NO: 30

SEQ ID NO: 491 - DNA, 483 bp, Enterococcus faecalis
atgaacatttttgctatccgtttaaaagaagctttaacagccaagaacatcaaacctagtgatttagcgaaaaaaactggcatcggtaaatcttcgatcagcgattggctagctggtcgttacgaagcaaaacaagacaaagtttatcgcattgcagatgcattagacattaatgaggcctggttgatgggacaagaagttcccatggaaaaaaatgcctcaactatcgaccgcatttataaaaaattagagccccaacgacaagccatcgtttatcaatttgccgaacaacaattacacgaacaacaaacgcaagcagaaattctctcattccctcgccgtgacgaaatgacactggctgcccacgctggggatccagaaaagatattttcaaaagaagaaatcgagaaaattcacgattacttggatgaaattgatgccaaatatcaacaatcgatttcttctgacaaaaaagaggattaa

SEQ ID NO: 492 - protein, 160 aa, Enterococcus faecalis; identical to SEQ ID NO: 454

SEQ ID NO: 493 - DNA, 483 bp, Enterococcus faecalis
atgaacatttttgctatccgtttaaaagaagctttaacagccaagaacatcaaacctagtgatttagcgaaaaaaactggcatcggtaaatcttcaatcagcgattggctagctggtcgttacgaagcaaaacaagacaaagtttatcgcattgcagatgcattagacattaatgaggcctggttgatgggacaagaggttcccatggaaaaaaatgcctcaactatcgaccgcatttataaaaaattagagccccaacgacaagccatcgtttatcaatttgccgaacaacaattacacgaacaacaaacgcaagcagaaattctctcattccctcgccgtgacgaaatgacactggctgcccacgctggggatccagaaaagatattttcaaaagaagaaatcgagaaaattcacgattacttggatgaaattgatgccaaatatcaacaatcgatttcttctgacaaaaaagaggattaa

SEQ ID NO: 494 - protein, 160 aa, Enterococcus faecalis; identical to SEQ ID NO: 454

SEQ ID NO: 495 - DNA, 483 bp, Enterococcus faecalis
atgaacatttttgctatccgtttaaaagaggctttaacagccaagaacatcaaacctagtgaattagcgaaaaaaactggcatcggtaaatcttcgatcagcgattggctagctggtcgttacgaagcaaaacaagacaaagtttatcgcattgcagatgcattagatattaatgaggcctggttgatgggacaagaggttcccatggaaaaaaatgcctcaactatcgaccgcatttataaaaaattagaaccccaacgacaagccatcgtttatcaatttgccgaacaacaattacacgaacaacaaacgcaagcagaaattctctcattccctcgccgtgacgaaatgacactggctgcccacgctggggatccagaaaagatattttcaaaagaagaaatcgagaaaattcacgattacttggatgaaattgatgccaaatatcaacaatcgatttcttctgacaaaaaagaggattaa

SEQ ID NO: 496 - protein, 160 aa, Enterococcus faecalis; identical to SEQ ID NO: 442

SEQ ID NO: 497 - DNA, 483 bp, Enterococcus faecalis
atgaacatttttgctatccgtttaaaagaggctttaacagccaagaacatcaaacctagtgaattagcgaaaaaaactggcatcggtaaatcttcgatcagcgattggctagctggtcgttacgaagcaaaacaagacaaagtttatcgcattgcagatgcattagacattaatgaggcctggttgatgggacaagaagttcccatggaaaaaaatgcctcaactatcgaccgcatttataaaaaattagagccccaacgacaagccatcgtttatcaatttgccgaacaacaattacacgaacaacaaacgcaagcagaaattctctcattccctcgccgtgacgaaatgacactggctgcccacgctggggatccagaaaagatattttcaaaagaagaaatcgagaaaattcacgattacttggatgaaattgatgccaaatatcaacaatcgatttcttctgacaaaaaagaggattaa

SEQ ID NO: 498 - protein, 160 aa, Enterococcus faecalis; identical to SEQ ID NO: 442

SEQ ID NO: 499 - DNA, 483 bp, Enterococcus faecalis; identical to SEQ ID NO: 455

SEQ ID NO: 500 - protein, 160 aa, Enterococcus faecalis; identical to SEQ ID NO: 30

SEQ ID NO: 501 - DNA, 483 bp, Enterococcus faecalis; identical to SEQ ID NO: 54

SEQ ID NO: 502 - protein, 160 aa, Enterococcus faecalis; identical to SEQ ID NO: 30

SEQ ID NO: 503 - DNA, 483 bp, Enterococcus faecalis
atgaacatttttgctatccgtttaaaagaggctttaacagtcaagaacatcaaacctagtgaattagcgaaaaaaactggcatcggtaaatcttcgatcagcgattggctagctggtcgttacgaagcgaaacaagacaaagtttatcgcattgcagatgcattagacattaatgaggcctggttgatgggacaagaggttcccatggaaaaaaatgcctcaactattgaccgcatttataaaaaattagaaccccaacgacaagctatcgtttatcaatttgccgaacaacaattacacgaacaacaaacgcaagcagaaattctctcattccctcgccgtgacgaaatgacactggctgcccacgctggggatccagaaaagatattttcaaaagaagaaatcgagaaaattcacgattacttggatgaaattgatgccaaatatcaacaatcgatttcttctgacaaaaaagaggattaa

SEQ ID NO: 504 - protein, 160 aa, Enterococcus faecalis
MNIFAIRLKEALTVKNIKPSELAKKTGIGKSSISDWLAGRYEAKQDKVYRIADALDINEAWLMGQEVPMEKNASTIDRIYKKLEPQRQAIVYQFAEQQLHEQQTQAEILSFPRRDEMTLAAHAGDPEKIFSKEEIEKIHDYLDEIDAKYQQSISSDKKED

SEQ ID NO: 505 - DNA, 483 bp, Enterococcus faecalis; identical to SEQ ID NO: 54

SEQ ID NO: 506 - protein, 160 aa, Enterococcus faecalis; identical to SEQ ID NO: 30

SEQ ID NO: 507 - DNA, 483 bp, Enterococcus faecalis; identical to SEQ ID NO: 54

SEQ ID NO: 508 - protein, 160 aa, Enterococcus faecalis; identical to SEQ ID NO: 30

SEQ ID NO: 509 - DNA, 483 bp, Enterococcus faecalis; identical to SEQ ID NO: 54

SEQ ID NO: 510 - protein, 160 aa, Enterococcus faecalis; identical to SEQ ID NO: 30

SEQ ID NO: 511 - DNA, 483 bp, Enterococcus faecalis; identical to SEQ ID NO: 54

SEQ ID NO: 512 - protein, 160 aa, Enterococcus faecalis; identical to SEQ ID NO: 30

SEQ ID NO: 513 - DNA, 1125 bp, Enterococcus faecalis
atgagtaggaagcgaaaaatcagcttaattagtttagtcatcattttggtttttgtcacagtcggctcagcatactttgctgtagcgggtagctatttaaagaaaacaattgataaaggctatgttcccataaaaaatgattataatgaagcgcaaaataaagatagtcaatcgtttttgattatggggctagacaatacaattgaacggaaattaggcacaactaggactgatgctatgatggtgattaccgtgaataacaagacgaagaaaataacctatttaagtttgccacgggatagttttgtgcaaattgatgcgaaaaattaccaagggatgcagcgaattgaagccgcctatacctacgatggaccaacagcttctgttaacacagttgagaaattattgaatattccaatcaatcattacgttgtgtttaactttttatcttttattaagttaattgatgcagttggcggcatagatgtcaatgtcaagcaggcgtttgatggtgtcaccaaagacgggccaggatccattcattttgatgcagggaaacagcatttagatggtacgaaagctttatcttatgcccgtgaaagacatagcgataacgatattatgcgtggattccgacaacaagaaattattcaagcagttgaagacaagttgaaatctggtcaatcaatcatgaaaataatggacattattgattcgttaaatggaaacattcaaactgatgtggattccaatgaattgactcatttagtcaaagaaggtttgacttggaccaattatgataaacaacagctttcttttgactggcgcacttttagtaatgaagggcgcagtatggttgaactatatccagatagtattgaaaatgtccgtcatcaattacgtgtgtctttaaatttagaaaagccagatgaacgagatcaagacggctatgtcttccatacgaacggtgaatttttatatcaaagtgattataccgttcaagatgaagcagctgaggaaaacgaaatgacttccatcaacggcaatacgtatattggtgttcctggcaatacacagaccggcccgttgccatcagttaaaacggaaaatggctttataaaataa

SEQ ID NO: 514 - protein, 374 aa, Enterococcus faecalis; identical to SEQ ID NO: 77

SEQ ID NO: 515 - DNA, 1125 bp, Enterococcus faecalis; identical to SEQ ID NO: 513

SEQ ID NO: 516 - protein, 374 aa, Enterococcus faecalis; identical to SEQ ID NO: 77

SEQ ID NO: 517 - DNA, 1125 bp, Enterococcus faecalis
atgagtaggaagcgaaaaatcagcttaattagtttagtcatcattttggtttttgtcacagtcggctcagcatactttgctgtagcgggtagctatttaaagaaaacaattgataaaggctatgttcccataaaaaatgattataatgaagcgcaaaataaagatagtcaatcgtttttgattatggggctagacaatacaattgaacggaaattaggcacaactaggactgatgctatgatggtgattaccgtgaataacaagacgaagaaaataacctatttaagtttgccacgggatagttttgttcaaattgatgcgaaaaattaccaagggatgcaacgaattgaagctgcctatacctacgatggaccaacagcttctgttaacacagttgagaaattattgaatattccaatcaatcattacgttgtgtttaactttttatcttttattaagttaattgatgcagttggcggcatagatgtcaatgtcaagcaggcgtttgatggtgtcaccaaagacgggccaggatccattcattttgatgcagggaaacagcatttagatggtacgaaagctttatcttatgcccgtgaaagacatagcgataacgatattatgcgtggattccgacaacaagaaattattcaagcagttgaagacaagttgaaatctggtcaatcaatcatgaaaataatggacattattgattcgttaaatggaaacattcaaactgatgtggattccaatgaattgactcatttagtcaaagaaggtttgacttggaccaattatgataaacaacagctttcttttgactggcgcacttttagtaatgaagggcgcagtatggttgaactatatccagatagtattgaaaatgtccgtcatcaattacgtgtgtctttaaatttagaaaagccagatgaacgagatcaagacggctatgtcttccatacgaacggtgaatttttatatcaaagtgattataccgttcaagatgaagcagctgaggaaaacgaaatgacttccatcaacggcaatacgtatattggtgttcctggcaatacacagactggcccgttgccatcagttaaaacggaaaatggctttataaaataa

SEQ ID NO: 518 - protein, 374 aa, Enterococcus faecalis; identical to SEQ ID NO: 77

SEQ ID NO: 519 - DNA, 1125 bp, Enterococcus faecalis
atgagtaggaagcgaaaaatcagcttaattagtttagtcatcattttggtttttgtcacagtcggctcagcatactttgctgtagcgggtagctatttaaagaaaacaattgataaaggctatgttcccataaaaaatgattataatgaagcgcaaaataaagatagtcaatcgtttttgattatggggctagacaatacaattgaacggaaattaggcacaactaggactgatgctatgatggtgattaccgtgaataacaagacgaagaaaataacctatttaagtttgccacgggatagttttgtgcaaattgatgcgaaaaattaccaagggatgcagcgaattgaagccgcctatacctacgatggaccaacagcttctgttaacacagttgagaaattattgaatattccaatcaatcattacgttgtgtttaactttttatcttttattaagttaattgatgcagttggcggcatagatgtcaatgtcaagcaggcgtttgatggtgtcaccaaagacgggccaggatccattcattttgatgcagggaaacagcatttagatggtacgaaagctttatcttatgcccgtgaaagacatagcgataacgatattatgcgtggattccgacaacaagaaattattcaagcagttgaagacaagttgaaatctggtcaatcaatcatgaaaataatggacattattgattcgttaaatggaaacattcaaactgatgtggattccaatgaattgactcatttagtcaaagaaggtttgacttggaccaattatgataaacaacagctttcttttgactggcgcacttttagtaatgaagggcgcagtatggttgaactatatccagatagtattgaaaatgtccgtcatcaattacgtgtgtctttaaatttagaaaagccagatgaacgagatcaagacggctatgtcttccatacgaacggtgaatttttatatcaaagtgattataccgttcaagatgaagcagctgaggaaaacgaattgacttccatcaacggcaatacgtatattggtgttcctggcaatacacagaccggcccgttgccatcagttaaaacgggaaatggctttataaaataa

SEQ ID NO: 520 - protein, 374 aa, Enterococcus faecalis
MSRKRKISLISLVIILVFVTVGSAYFAVAGSYLKKTIDKGYVPIKNDYNEAQNKDSQSFLIMGLDNTIERKLGTTRTDAMMVITVNNKTKKITYLSLPRDSFVQIDAKNYQGMQRIEAAYTYDGPTASVNTVEKLLNIPINHYVVFNFLSFIKLIDAVGGIDVNVKQAFDGVTKDGPGSIHFDAGKQHLDGTKALSYARERHSDNDIMRGFRQQEIIQAVEDKLKSGQSIMKIMDIIDSLNGNIQTDVDSNELTHLVKEGLTWTNYDKQQLSFDWRTFSNEGRSMVELYPDSIENVRHQLRVSLNLEKPDERDQDGYVFHTNGEFLYQSDYTVQDEAAEENELTSINGNTYIGVPGNTQTGPLPSVKTGNGFIK

SEQ ID NO: 521 - DNA, 1125 bp, Enterococcus faecalis
atgagtaggaagcgaaaaatcagcttaattagtttagtcatcattttgttttttgtcacagtcggctcagcatactttgctgtagcgggtagctatttaaagaaaacaattgataaaggctatgttcccataaaaaatgattataatgaagcgcaaaataaagatagtcaatcgtttttgattatggggctagacaatacaattgaacggaaattaggcacaactaggactgatgctatgatggtgattaccgtgaataacaagacgaagaaaataacctatttaagtttgccacgggatagttttgttcaaattgatgcgaaaaattaccaagggatgcagcgaattgaagccgcctatacctacgatggaccaacagcttctgttaacacagttgagaaattattgaatattccaatcaatcattacgttgtgtttaactttttatcttttattaagttaattgatgcggttggtggcatagatgtcaatgtcaagcaggcgtttgatggtgtcaccaaagacgggccaggatccattcattttgatgcagggaaacagcatttagatggtacgaaagctttatcttatgctcgtgaaagacatagcgataacgatattatgcgtggattccgacaacaagaaattattcaagcagttgaagacaagttgaaatctggtcaatcaatcatgaaaataatggacattattgattcgttaaatggaaacattcaaactgatgtggattccaatgaattgactcatttagtcaaagaaggtttgacttggaccaattatgataaacaacagctttcttttgactggcgcacttttagtaatgaagggcgcagtatggttgaactatatccagatagtattgaaaatgtccgtcatcaattacgtgtgtctttaaatttagaaaagccagatgaacgagatcaagacggctatgtcttccatacgaacggtgaatttttatatcaaagtgattataccgttcaagatgaagcagctgaggaaaacgaaatgacttccatcaacggcaatacgtatattggtgttcctggtaatacacagaccggcccgttgccatcagttaaaacggaaaatggctttataaaataa

SEQ ID NO: 522 - protein, 374 aa, Enterococcus faecalis
MSRKRKISLISLVIILFFVTVGSAYFAVAGSYLKKTIDKGYVPIKNDYNEAQNKDSQSFLIMGLDNTIERKLGTTRTDAMMVITVNNKTKKITYLSLPRDSFVQIDAKNYQGMQRIEAAYTYDGPTASVNTVEKLLNIPINHYVVFNFLSFIKLIDAVGGIDVNVKQAFDGVTKDGPGSIHFDAGKQHLDGTKALSYARERHSDNDIMRGFRQQEIIQAVEDKLKSGQSIMKIMDIIDSLNGNIQTDVDSNELTHLVKEGLTWTNYDKQQLSFDWRTFSNEGRSMVELYPDSIENVRHQLRVSLNLEKPDERDQDGYVFHTNGEFLYQSDYTVQDEAAEENEMTSINGNTYIGVPGNTQTGPLPSVKTENGFIK

SEQ ID NO: 523 - DNA, 1125 bp, Enterococcus faecalis; identical to SEQ ID NO: 513

SEQ ID NO: 524 - protein, 374 aa, Enterococcus faecalis; identical to SEQ ID NO: 77

SEQ ID NO: 525 - DNA, 1125 bp, Enterococcus faecalis
atgagtaggaagcgaaaaatcagcttaattagtttagtcatcattttgttttttgtcacagtcggctcagcatactttgctgtagcgggtagctatttaaagaaaacaattgataaaggctatgttcccataaaaaatgattatactgaagcgcaaaataaagatagtcaatcgtttttggtcatgggtctagacaatacaattgaacggaaattaggcacaactaggactgatgctatgatggtgattaccgtgaataacaagacgaagaaaataacctatttaagtttgccacgggatagttttgttcaaattgatgcaaaaaattaccaagggatgcaacgaattgaagccgcctatacctacgatggaccaacagcttctgttaacacagttgagaaattattgaatattccaatcaatcattacgttgtgtttaactttttatcttttattaagttaattgatgcagttggcggcatagatgtcaatgtcaagcaggcgtttgatggtgtcaccaaagacgggccaggatccattcattttgatgcagggaaacagcatttagatggtacgaaagctttatcttatgcccgtgaaagacatagcgataacgatattatgcgtggattccgacaacaagaaattattcaagcagttgaagacaagttgaaatctggtcaatcaatcatgaaaataatggacattattgattcgttaaatggaaacattcaaactgatgtggattccaatgaattgactcatttagtcaaagaaggcttgacttggaccaattatgataaacaacagctttcttttgactggcgcacttttagtaatgaagggcgcagtatggttgaactatatccagatagtattgaaaatgtccgtcatcaattacgcgtgtctttaaatttagaaaagccagatgaacgagatcaagacggctatgtcttccatacgaacggtgaatttttatatcaaagtgattataccgttcaagatgaagcagctgaggaaaacgaaatgacttccatcaacggcaatacgtatattggtgttcctggcaatacacagactggcccgttgccatcagttaaaacggaaaatggctttataaaataa

SEQ ID NO: 526 - protein, 374 aa, Enterococcus faecalis
MSRKRKISLISLVIILFFVTVGSAYFAVAGSYLKKTIDKGYVPIKNDYTEAQNKDSQSFLVMGLDNTIERKLGTTRTDAMMVITVNNKTKKITYLSLPRDSFVQIDAKNYQGMQRIEAAYTYDGPTASVNTVEKLLNIPINHYVVFNFLSFIKLIDAVGGIDVNVKQAFDGVTKDGPGSIHFDAGKQHLDGTKALSYARERHSDNDIMRGFRQQEIIQAVEDKLKSGQSIMKIMDIIDSLNGNIQTDVDSNELTHLVKEGLTWTNYDKQQLSFDWRTFSNEGRSMVELYPDSIENVRHQLRVSLNLEKPDERDQDGYVFHTNGEFLYQSDYTVQDEAAEENEMTSINGNTYIGVPGNTQTGPLPSVKTENGFIK

SEQ ID NO: 527 - DNA, 1125 bp, Enterococcus faecalis
atgagtaggaagcgaaaaatcagcttaattagtttagtcatcattttggtttttgtcacagtcggctcagcatactttgctgtagcgggtagctatttaaagaaaacaattgataaaggctatgttcccataaaaaatgattataatgaagcgcaaaataaagatagtcaatcgtttttgattatggggctagacaatacaattgaacggaaattaggcacaactaggactgatgctatgatggtgattaccgtgaataacaagacgaagaaaataacctatttaagtttgccacgggatagttttgttcaaattgatgcgaaaaattaccaagggatgcaacgaattgaagctgcctatacctacgatggaccaacagcttctgttaacacagttgagaaattattgaatattccaatcaatcattacgttgtgtttaactttttatcttttattaagttaattgatgcagttggcggcatagatgtcaatgtcaagcaggcgtttgatggtgtcaccaaagacgggccaggatccattcattttgatgcagggaaacagcatttagatggtacgaaagctttatcttatgcccgtgaaagacatagcgataacgatattatgcgtggattccgacaacaagaaattattcaagcagttgaagacaagttgaaatctggtcaatcaatcatgaaaataatggacattattgattcgttaaatggaaacattcaaactgatgtggattccaatgaattgactcatttagtcaaagaaggtttgacttggaccaattatgataaacaacagctttcttttgactggcgcacttttagtaatgaagggcgcagtatggttgaactatatccagatagtattgaaaatgtccgtcatcaattacgtgtgtctttaaatttagaaaagccagatgaacgagatcaagacggctatgtcttccatacgaacggtgaatttttatatcaaagtgattataccgttcaagatgaagcagctgaggaaaacgaaatgacttccatcaacggcaatacgtatattggtgttcctggcaatacacagaccggcccgttgccatcagttaaaacggaaaatggctttataaaataa

SEQ ID NO: 528 - protein, 374 aa, Enterococcus faecalis; identical to SEQ ID NO: 77

SEQ ID NO: 529 - DNA, 1125 bp, Enterococcus faecalis
atgagtaggaagcgaaaaatcagcttaattagtttagtcatcattttggtttttgtcacagtcggctcagcatactttgctgtagcgggtagctatttaaagaaaacaattgataaaggctatgttcccataaaaaatgattataatgaagcgcaaaataaagatagtcaatcgtttttgattatggggctagacaatacaattgaacggaaattaggcacaactaggactgatgctatgatggtgattaccgtgaataacaagacgaagaaaataacctatttaagtttgccacgggatagttttgttcaaattgatgcgaaaaattaccaagggatgcagcgaattgaagccgcctatacctacgatggaccaacagcttctgttaacacagttgagaaattattgaatattccaatcaatcattacgttgtgtttaactttttatcttttattaagttaattgatgcggttggtggcatagatgtcaatgtcaagcaggcgtttgatggtgttaccaaagacgggccaggatccattcattttgatgcagggaaacagcatttagatggtacgaaagctttatcttatgcccgtgaaagacatagcgataacgatattatgcgtggattccgacaacaagaaattattcaagcagttgaagacaagttgaaatctggtcaatcaatcatgaaaataatggacattattgattcgttaaatggaaacattcaaactgatgtggattccaatgaattgactcatttagtcaaagaaggtttgaattggaccaattatgataaacaacagctttcttttgactggcgcacttttagtaatgaagggcgcagtatggttgaactatatccagatagtattgaaaatgtccgtcatcaattacgtgtgtctttaaatttagaaaagccagatgaacgagatcaagacggctatgtcttccatacgaacggtgaatttttatatcaaagtgattataccgttcaagatgaagcagctgaggaaaacgaaatgacttccatcaacggcaatacgtatattggtgttcctggcaatacacagaccggcccgttgccatcagttaaaacggaaaatggctttataaaataa

SEQ ID NO: 530 - protein, 374 aa, Enterococcus faecalis
MSRKRKISLISLVIILVFVTVGSAYFAVAGSYLKKTIDKGYVPIKNDYNEAQNKDSQSFLIMGLDNTIERKLGTTRTDAMMVITVNNKTKKITYLSLPRDSFVQIDAKNYQGMQRIEAAYTYDGPTASVNTVEKLLNIPINHYVVFNFLSFIKLIDAVGGIDVNVKQAFDGVTKDGPGSIHFDAGKQHLDGTKALSYARERHSDNDIMRGFRQQEIIQAVEDKLKSGQSIMKIMDIIDSLNGNIQTDVDSNELTHLVKEGLNWTNYDKQQLSFDWRTFSNEGRSMVELYPDSIENVRHQLRVSLNLEKPDERDQDGYVFHTNGEFLYQSDYTVQDEAAEENEMTSINGNTYIGVPGNTQTGPLPSVKTENGFIK

SEQ ID NO: 531 - DNA, 1125 bp, Enterococcus faecalis; identical to SEQ ID NO: 513

SEQ ID NO: 532 - protein, 374 aa, Enterococcus faecalis; identical to SEQ ID NO: 77

SEQ ID NO: 533 - DNA, 1125 bp, Enterococcus faecalis
atgagtaggaagcgaaaaatcagcttaattagtttagtcatcattttgttttttgtcacagtcggctcagcatactttgctgtagcgggtagctatttaaagaaaacaattgataaaggctatgttcccataaaaaatgattatactgaagcgcaaaataaagatagtcaatcgtttttggtcatgggtctagacaatacaattgaacggaaattaggcacaactaggactgatgctatgatggtgattaccgtgaataacaagacgaagaaaataacctatttaagtttgccacgggatagttttgttcaaattgatgcaaaaaattaccaagggatgcaacgaattgaagccgcctatacctacgatggaccaacagcttctgttaacacagttgagaaattattgaatattccaatcaatcattacgttgtgtttaactttttatcttttattaagttaattgatgcagttggcggcatagatgtcaatgtcaagcaggcgtttgatggtgtcaccaaagacgggccaggatccattcattttgatgcagggaaacagcatttagatggtacgaaagctttatcttatgcccgtgaaagacatagcgataacgatattatgcgtggattccgacaacaagaaattattcaagcggttgaagacaagttgaaatctggtcaatcaatcatgaaaataatggacattattgattcgttaaatggaaacattcaaactgatgtggattccaatgaattgactcatttagtcaaagaaggtttgacttggaccaattatgataaacaacagctttcttttgactggcgcacttttagtaatgaagggcgcagtatggttgaactatacccagatagtattgaaaatgtccgtcatcaattacgtgtgtctttaaatttagaaaagccagatgaacgagatcaagacggctatgtcttccatacgaacggtgaatttttatatcaaagtgattataccgttcaagatgaagcagctgaggaaaacgaaatgacttccatcaacggcaatacgtatattggtgttcctggcaatacacagaccggcccgttgccatcagttaaaacggaaaatggctttataaaataa

SEQ ID NO: 534 - protein, 374 aa, Enterococcus faecalis; identical to SEQ ID NO: 526

SEQ ID NO: 535 - DNA, 1125 bp, Enterococcus faecalis
atgagtaggaagcgaaaaatcagcttaattagtttagtcatcattttgttttttgtcacagtcggctcagcatactttgctgtagcgggtagctatttaaagaaaacgattgataaaggctatgtccccataaaaaatgattatactgaatcgcaaaataaagatagtcaatcgtttttggtcatgggtctagacaatacaattgaacggaaattaggcacaactaggactgatgctatgatggtgattaccgtgaataacaagacgaagaaaataacctatttaagtttgccacgggatagttttgttcaaattgatgcgaaaaattaccaagggatgcagcgaattgaagccgcctatacctacgatggaccaacagcttctgttaacacagttgagaaattattgaatattccaatcaatcattacgttgtgtttaactttttatcttttattaagttaattgatgcagttggcggcatagatgtcaatgtcaagcaggcgtttgatggtgtcaccaaagacgggccaggatccattcattttgatgcagggaaacagcatttagatggtacgaaagctttatcttatgcccgtgaaagacatagcgataacgatattatgcgtggattccgacaacaagaaattattcaagcagttgaagacaagttgaaatctggtcaatcaatcatgaaaataatggacattattgattcgttaaatggaaacattcaaactgatgtggattccaatgaattgactcatttagtcaaagaaggtttgacttggaccaattatgataaacaacagctttcttttgactggcgcacttttagtaatgaagggcgcagtatggttgaactatatccagatagtattgaaaatgtccgtcatcaattacgcgtgtctttaaatttagaaaagccagatgaacgagatcaagacggctatgtcttccatacgaacggtgaatttttatatcaaagtgattataccgttcaagatgaagcagctgaggaaaacgaaatgacttccatcaacggcaatacgtatattggtgttcctggcaatacacagactggcccgttgccatcagttaaaacggaaaatggctttataaaataa

SEQ ID NO: 536 - protein, 374 aa, Enterococcus faecalis
MSRKRKISLISLVIILFFVTVGSAYFAVAGSYLKKTIDKGYVPIKNDYTESQNKDSQSFLVMGLDNTIERKLGTTRTDAMMVITVNNKTKKITYLSLPRDSFVQIDAKNYQGMQRIEAAYTYDGPTASVNTVEKLLNIPINHYVVFNFLSFIKLIDAVGGIDVNVKQAFDGVTKDGPGSIHFDAGKQHLDGTKALSYARERHSDNDIMRGFRQQEIIQAVEDKLKSGQSIMKIMDIIDSLNGNIQTDVDSNELTHLVKEGLTWTNYDKQQLSFDWRTFSNEGRSMVELYPDSIENVRHQLRVSLNLEKPDERDQDGYVFHTNGEFLYQSDYTVQDEAAEENEMTSINGNTYIGVPGNTQTGPLPSVKTENGFIK

SEQ ID NO: 537 - DNA, 1125 bp, Enterococcus faecalis; identical to SEQ ID NO: 513

SEQ ID NO: 538 - protein, 374 aa, Enterococcus faecalis; identical to SEQ ID NO: 77

SEQ ID NO: 539 - DNA, 1125 bp, Enterococcus faecalis
atgagtaggaagcgaaaaatcagcttaattagtttagtcatcattttgttttttgtcacagtcggctcagcatactttgctgtagcgggtagctatttaaagaaaacaattgataaaggctatgttcccataaaaaatgattataatgaagcgcaaaataaagatagtcaatcgtttttgattatggggctagacaatacaattgaacggaaattaggcacaactaggactgatgctatgatggtgattaccgtgaataacaagacgaagaaaataacctatttaagtttgccacgggatagttttgtgcaaattgatgcgaaaaattaccaagggatgcagcgaattgaagccgcctatacctacgatggaccaacagcttctgttaacacagttgagaaattattgaatattccaatcaatcattacgttgtgtttaactttttatcttttattaagttaattgatgcggttggcggcatagatgtcaatgtcaagcaggcgtttgatggtgtcaccaaagacgggccaggatccattcattttgatgcagggaaacagcatttagatggtacgaaagctttatcttatgcccgtgaaagacatagcgataacgatattatgcgtggattccgacaacaagaaattattcaagcagttgaagacaagttgaaatctggtcaatcaatcatgaaaataatggacattattgattcgttaaatggaaacattcaaactgatgtggattccaatgaattgactcatttagtcaaagaaggtttgacttggaccaattatgataaacaacagctttcttttgactggcgcacttttagtaatgaagggcgcagtatggttgaactatatccagatagtattgaaaatgtccgtcatcaattacgtgtgtctttaaatttagaaaagccagatgaacgagatcaagacggctatgtcttccatacgaacggtgaatttttatatcaaagtgattataccgttcaagatgaagcagctgaggaaaacgaaatgacttccatcaacggcaatacgtatattggtgttcctggcaatacacagaccggcccgttgccatcagttaaaacggaaaatggctttataaaataa

SEQ ID NO: 540 - protein, 374 aa, Enterococcus faecalis; identical to SEQ ID NO: 522

SEQ ID NO: 541 - DNA, 1125 bp, Enterococcus faecalis; identical to SEQ ID NO: 525

SEQ ID NO: 542 - protein, 374 aa, Enterococcus faecalis; identical to SEQ ID NO: 526

SEQ ID NO: 543 - DNA, 1125 bp, Enterococcus faecalis
atgagtaggaagcgaaaaatcagcttaattagtttagtcatcattttgttttttgtcacagtcggctcagcatactttgctgtagcgggtagctatttaaagaaaacgattgataaaggctatgtccccataaaaaatgattatactgaagcgcaaaataaagatagtcaatcgtttttggtcatgggtctagacaatacaattgaacggaaattaggcacaactaggactgatgctatgatggtgattaccgtgaataacaagacgaagaaaataacatatttaagtttgccacgggatagttttgttcaaattgatgcaaaaaattaccaagggatgcaacgaattgaagccgcctatacctacgatggaccaacagcttctgttaacacagttgagaaattattgaatattccaatcaatcattacgttgtgtttaactttttatcttttattaagttaattgatgcagttggcggcatagatgtcaatgtcaagcaggcgtttgatggtgtcaccaaagacgggccaggatccattcattttgatgcagggaaacagcatttagatggtacgaaagctttatcttatgcccgtgaaagacatagcgataacgatattatgcgtggattccgacaacaagaaattattcaagcagttgaagacaagttgaaatctggtcaatcaatcatgaaaataatggacattattgattcgttaaatggaaacattcaaactgatgtggattccaatgaattgactcatttagtcaaagaaggtttgacttggaccaattatgataaacaacagctttcttttgactggcgcacttttagtaatgaagggcgcagtatggttgaactatatccagatagtattgaaaatgtccgtcatcaattacgtgtgtctttaaatttagaaaagccagatgaacgagatcaagacggctatgtcttccatacgaacggtgaatttttatatcaaagtgattataccgttcaagatgaagcagctgaggaaaacgaaatgacttccatcaacggcaatacgtatattggtgttcctggcaatacacagactggcccgttgccatcagttaaaacggaaaatggctttataaaataa

SEQ ID NO: 544 - protein, 374 aa, Enterococcus faecalis; identical to SEQ ID NO: 526

SEQ ID NO: 545 - DNA, 1125 bp, Enterococcus faecalis; identical to SEQ ID NO: 513

SEQ ID NO: 546 - protein, 374 aa, Enterococcus faecalis; identical to SEQ ID NO: 77

SEQ ID NO: 547 - DNA, 1125 bp, Enterococcus faecalis
atgagtaggaagcgaaaaatcagcttaattagtttagtcatcattttgttttttgtcacagtcggctcagcatactttgctgtagcgggtagctatttaaagaaaacaattgataaaggctatgttcccataaaaaatgattataatgaagcgcaaaataaagatagtcaatcgtttttgattatggggctagacaatacaattgaacggaaattaggcacaactaggactgatgctatgatggtgattaccgtgaataacaagacgaagaaaataacctatttaagcttgccacgggatagttttgttcaaattgatgcgaaaaattatcaagggatgcagcgaattgaagctgcctatacctacgatggaccaacagcttctgttaacacagttgagaaattattgaatattccaatcaatcattacgttgtgtttaactttttatcttttattaagttaattgatgcggttggtggcatagatgtcaatgtcaagcaggcgtttgatggtgtcaccaaagacgggccaggatccattcattttgatgcagggaaacagcatttagatggtacgaaagctttatcttatgcccgtgaaagacatagcgataacgatattatgcgtggattccgacaacaagaaattattcaagcagttgaagacaagttgaaatctggtcaatcaatcatgaaaataatggacattattgattcgttaaatggaaacattcaaactgatgtggattccaatgaattgactcatttagtcaaagaaggtttgacttggaccaattatgataaacaacagctttcttttgactggcgcacttttagtaatgaagggcgcagtatggttgaactatatccagatagtattgaaaatgtccgccatcaattacgtgtgtctttaaatttagaaaagccagatgaacgagatcaagacggctatgtcttccatacgaacggtgaatttttatatcaaagtgattataccgttcaagatgaagcagctgaggaaaacgaaatgacttccatcaacggcaatacgtatattggtgttcctggtaatacacagactggcccgttaccatcagttaaaacggaaaatggctttataaaataa

SEQ ID NO: 548 - protein, 374 aa, Enterococcus faecalis; identical to SEQ ID NO: 522

SEQ ID NO: 549 - DNA, 1125 bp, Enterococcus faecalis
atgagtaggaagcgaaaaatcagcttaattagtttagtcatcattttggtttttgtcacagtcggctcagcatactttgctgtagcgggtagctatttaaagaaaacaattgataaaggctatgttcccataaaaaatgattataatgaagcgcaaaataaagatagtcaatcgtttttgattatggggctagacaatacaattgaacggaaattaggcacaactaggactgatgctatgatggtgattaccgtgaataacaagacgaagaaaataacctatttaagtttgccacgggatagttttgtgcaaattgatgcgaaaaattaccaagggatgcagcgaattgaagccgcctatacctacgatggaccaacagcttctgttaacacagttgagaaattattgaatattccaatcaatcattacgttgtgtttaactttttatcttttattaagttaattgatgcggttggtggcatagatgtcaatgtcaagcaggcgtttgatggtgttaccaaagacgggccaggatccattcattttgatgcagggaaacagcatttagatggtacgaaagctttatcttatgcccgtgaaagacatagcgataacgatattatgcgtggattccgacaacaagaaattattcaagcggttgaagacaagttgaaatctggtcaatcaatcatgaaaataatggacattattgattcgttaaatggaaacattcaaactgatgtggattccaatgaattgactcatttagtcaaagaaggtttgacttggaccaattatgataaacaacagctttcttttgactggcgcacttttagtaatgaagggcgcagtatggttgaactatatccagatagtattgaaaatgtccgtcatcaattacgtgtgtctttaaatttagaaaagccagatgaacgagatcaagacggctatgtcttccatacgaacggtgaatttttatatcaaagtgattataccgttcaagatgaagcagctgaggaaaacgaaatgacttccatcaacggcaatacgtatattggtgttcctggcaatacacagaccggcccgttgccatcagttaaaacggaaaatggctttataaaataa

SEQ ID NO: 550 - protein, 374 aa, Enterococcus faecalis; identical to SEQ ID NO: 77

SEQ ID NO: 551 - DNA, 1125 bp, Enterococcus faecalis; identical to SEQ ID NO: 513

SEQ ID NO: 552 - protein, 374 aa, Enterococcus faecalis; identical to SEQ ID NO: 77

SEQ ID NO: 553 - DNA, 1125 bp, Enterococcus faecalis; identical to SEQ ID NO: 513

SEQ ID NO: 554 - protein, 374 aa, Enterococcus faecalis; identical to SEQ ID NO: 77

SEQ ID NO: 555 - DNA, 1125 bp, Enterococcus faecalis; identical to SEQ ID NO: 525

SEQ ID NO: 556 - protein, 374 aa, Enterococcus faecalis; identical to SEQ ID NO: 526

SEQ ID NO: 557 - DNA, 1125 bp, Enterococcus faecalis; identical to SEQ ID NO: 527

SEQ ID NO: 558 - protein, 374 aa, Enterococcus faecalis; identical to SEQ ID NO: 77

SEQ ID NO: 559 - DNA, 1125 bp, Enterococcus faecalis
atgagtaggaagcgaaaaatcagcttaattagtttagtcatcattttggtttttgtcacagtcggctcagcatactttgctgtagcgggtagctatttaaagaaaacaattgataaaggctatgttcccataaaaaatgattataatgaagcgcaaaataaagatagtcaatcgtttttgattatggggctagacaatacaattgaacggaaattaggcacaactaggactgatgctatgatggtgattaccgtgaataacaagacgaagaaaataacctatttaagtttgccacgggatagttttgtgcaaattgatgcgaaaaattaccaagggatgcagcgaattgaagccgcctatacctacgatggaccaacagcttctgttaacacagttgagaaattattgaatattccaatcaatcattacgttgtgtttaactttttatcttttattaagttaattgatgcagttggcggcatagatgtcaatgtcaagcaggcgtttgatggtgtcaccaaagacgggccaggatccattcattttgatgcagggaaacagcatttagatggtacgaaagctttatcttatgcccgtgaaagacatagcgataacgatattatgcgtggattccgacaacaagaaattattcaagcagttgaagacaagttgaaatctggtcaatcaatcatgaaaataatggacattattgattcgttaaatggaaacattcaaactgatgtggattccaatgaattgactcatttagtcaaagaaggtttgacttggaccaattatgataaacaacagctttcttttgactggcgcacttttagtaatgaagggcgcagtatggttgaactatatccagatagtattgaaaatgtccgtcatcaattacgtgtgtctttaaatttagaaaagccagatgaacgagatcaagacggctatgtcttccatacgaacggtgaatttttatatcaaagtgattataccgttcaagatgaagcagctgaggaaaatgaaatgacttccatcaacggcaatacgtatattggtgttcctggcaatacacagaccggcccgttgccatcagttaaaacggaaaatggctttataaaataa

SEQ ID NO: 560 - protein, 374 aa, Enterococcus faecalis; identical to SEQ ID NO: 77

SEQ ID NO: 561 - DNA, 1125 bp, Enterococcus faecalis
atgagtaggaagcgaaaaatcagcttaattagtttagtcatcattttgttttttgtcacagtcggctcagcatactttgctgtagcgggtagctatttaaagaaaacgattgataaaggctatgtccccataaaaaatgattatactgaagcgcaaaataaagatagtcaatcgtttttggtcatgggtctagacaatacaattgaacggaaattaggcacaactaggactgatgctatgatggtgattaccgtgaataacaagacgaagaaaataacatatttaagtttgccacgggatagttttgttcaaattgatgcaaaaaattaccaagggatgcaacgaattgaagccgcctatacctacgatggaccaacagcttctgttaacacagttgagaaattattgaatattccaatcaatcattacgttgtgtttaactttttatcttttattaagttaattgatgcagttggcggcatagatgtcaatgtcaagcaggcgtttgatggtgtcaccaaagacgggccaggatccattcattttgatgcagggaaacagcatttagatggtacgaaagctttatcttatgcccgtgaaagacatagcgataacgatattatgcgtggattccgacaacaagaaattattcaagcagttgaagacaagttgaaatctggtcaatcaatcatgaaaataatggacattattgattcgttaaatggaaacattcaaactgatgtggattccaatgaattgactcatttagtcaaagaaggtttgacttggaccaattatgataaacaacagctttcttttgactggcgcacttttagtaatgaagggcgcagtatggttgaactatatccagatagtattgaaaatgtccgtcatcaattacgtgtgtctttaaatttagaaaagccagatgaacgagatcaagacggctatgtcttccatacgaacggtgaatttttatatcaaagtgattataccgttcaagatgaagcagctgaggaaaacgaaatgacttccatcaacggcaatacgtatattggtgttcctggcaatacacagaccggcccgttgccatcagttaaaacggaaaatggctttataaaataa

SEQ ID NO: 562 - protein, 374 aa, Enterococcus faecalis; identical to SEQ ID NO: 526

SEQ ID NO: 563 - DNA, 1125 bp, Enterococcus faecalis; identical to SEQ ID NO: 57

SEQ ID NO: 564 - protein, 374 aa, Enterococcus faecalis; identical to SEQ ID NO: 77

SEQ ID NO: 565 - DNA, 1125 bp, Enterococcus faecalis
atgagtaggaagcgaaaaatcagcttaattagtttagtcatcattttgttttttgtcacagtcggctcagcatactttgctgtagcgggtagctatttaaagaaaacaattgataaaggctatgttcccataaaaaatgattataatgaagcgcaaaataaagatagtcaatcgtttttgattatggggctagacaatacaattgaacggaaattaggcacaactaggactgatgctatgatggtgattaccgtgaataacaagacgaagaaaataacctatttaagtttgccacgggatagttttgttcaaattgatgcgaaaaattaccaagggatgcaacgaattgaagctgcctatacctacgatggaccaacagcttctgttaacacagttgagaaattattgaatattccaatcaatcattacgttgtgtttaactttttatcttttattaagttaattgatgcggttggtggcatagatgtcaatgtcaagcaggcgtttgatggtgttaccaaagacgggccaggatccattcattttgatgcagggaaacagcatttagatggtacgaaagctttatcttatgcccgtgaaagacatagcgataacgatattatgcgtggattccgacaacaagaaattattcaagcagttgaagacaagttgaaatctggtcaatcaatcatgaaaataatggacattattgattcgttaaatggaaacattcaaactgatgtggattccaatgaattgactcatttagtcaaagaaggtttgacttggaccaattatgataaacaacagctttcttttgactggcgcacttttagtaatgaagggcgcagtatggttgaactatatccagatagtattgaaaatgtccgtcatcaattacgtgtgtctttaaatttagaaaagccagatgaacgagatcaagacggctatgtcttccatacgaacggtgaatttttatatcaaagtgattataccgttcaagatgaagcagctgaggaaaacgaaatgacttccatcaacggcaatacgtatattggtgttcctggcaatacacagaccggcccgttgccatcagttaaaacggaaaatggctttataaaataa

SEQ ID NO: 566 - protein, 374 aa, Enterococcus faecalis; identical to SEQ ID NO: 522

SEQ ID NO: 567 - DNA, 1125 bp, Enterococcus faecalis; identical to SEQ ID NO: 527

SEQ ID NO: 568 - protein, 374 aa, Enterococcus faecalis; identical to SEQ ID NO: 77

SEQ ID NO: 569 - DNA, 1125 bp, Enterococcus faecalis
atgagtaggaagcgaaaaatcagcttaattagtttagtcatcattttggtttttgtcacagtcggctcagcatactttgctgtagcgggtagctatttaaagaaaacaattgataaaggctatgttcccataaaaaatgattataatgaagcgcaaaataaagatagtcaatcgtttttgattatggggctagacaatacaattgaacggaaattaggcacaactaggactgatgctatgatggtgattaccgtgaataacaagacgaagaaaataacctatttaagtttgccacgggatagttttgtgcaaattgatgcgaaaaattaccaagggatgcagcgaattgaagccgcctatacctacgatggaccaacagcttctgttaacacagttgagaaattattgaatattccaatcaatcattacgttgtgtttaactttttatcttttattaagttaattgatgcagttggcggcatagatgtcaatgtcaagcaggcgtttgatggtgtcaccaaagacgggccaggatccattcattttgatgcagggaaacagcatttagatggtacgaaagctttatcttatgcccgtgaaagacatagcgataacgatattatgcgtggattccgacaacaagaaattattcaagcagttgaagacaagttgaaatctggtcaatcaatcatgaaaataatggacattattgattcgttaaatggaaacattcaaactgatgtggattccaatgaattgactcatttagtcaaagaaggtttgacttggaccaattatgataaacaacagctttcttttgactggcgcacttttagtaatgaagggcgcagtatggttgaactatacccagatagtattgaaaatgtccgtcatcaattacgtgtgtctttaaatttagaaaagccagatgaacgagatcaagacggctatgtcttccatacgaacggtgaatttttatatcaaagtgattataccgttcaagatgaagcagctgaggaaaacgaaatgacttccatcaacggcaatacgtatattggtgttcctggtaatacacagaccggcccgttgccatcagttaaaacggaaaatggctttataaaataa

SEQ ID NO: 570 - protein, 374 aa, Enterococcus faecalis; identical to SEQ ID NO: 77

SEQ ID NO: 571 - DNA, 1125 bp, Enterococcus faecalis
atgagtaggaagcgaaaaatcagcttaattagtttagtcatcattttggtttttgtcacagtcggctcagcatactttgctgtagcgggtagctatttaaagaaaacaattgataaaggctatgttcccataaaaaatgattataatgaagcgcaaaataaagatagtcaatcgtttttgattatggggctagacaatacaattgaacggaaattaggcacaactaggactgatgctatgatggtgattaccgtgaataacaagacgaagaaaataacctatttaagtttgccacgggatagttttgttcaaattgatgcgaaaaattaccaagggatgcagcgaattgaagccgcctatacctacgatggaccaacagcttctgttaacacagttgagaaattattgaatattccaatcaatcattacgttgtgtttaactttttatcttttattaagttaattgatgcggttggtggcatagatgtcaatgtcaagcaggcgtttgatggtgtcaccaaagacgggccaggatccattcattttgatgcagggaaacagcatttagatggtacgaaagctttatcttatgcccgtgaaagacatagcgataacgatattatgcgtggattccgacaacaagaaattattcaagcagttgaagacaagttgaaatctggtcaatcaatcatgaaaataatggacattattgattcgttaaatggaaacattcaaactgatgtggattccaatgaattgactcatttagtcaaagaaggtttgacttggaccaattatgataaacaacagctttcttttgactggcgcacttttagtaatgaagggcgcagtatggttgaactatatccagatagtattgaaaatgtccgtcatcaattacgtgtgtctttaaatttagaaaagccagatgaacgagatcaagacggctatgtcttccatacgaacggtgaatttttatatcaaagtgattataccgttcaagatgaagcagctgaggaaaacgaaatgacttccatcaacggcaatacgtatattggtgttcctggcaatacacagaccggcccgttgccatcagttaaaacggaaaatggctttataaaataa

SEQ ID NO: 572 - protein, 374 aa, Enterococcus faecalis; identical to SEQ ID NO: 77

SEQ ID NO: 573 - DNA, 1125 bp, Enterococcus faecalis; identical to SEQ ID NO: 513

SEQ ID NO: 574 - protein, 374 aa, Enterococcus faecalis; identical to SEQ ID NO: 77

SEQ ID NO: 575 - DNA, 1125 bp, Enterococcus faecalis
atgagtaggaagcgaaaaatcagcttaattagtttagtcatcattttgttttttgtcacagtcggctcagcatactttgctgtagcgggtagctatttaaagaaaacaattgataaaggctatgttcccataaaaaatgattataatgaagcgcaaaataaagatagtcaatcgtttttgattatggggctagacaatacaattgaacggaaattaggcacaactaggactgatgctatgatggtgattaccgtgaataacaagacgaagaaaataacctatttaagtttgccacgggatagttttgttcaaattgatgcaaaaaattaccaagggatgcagcgaattgaagctgcctatacctacgatggaccaacagcttctgttaacacagttgagaaattattgaatattccaatcaatcattacgttgtgtttaactttttatcttttattaagttaattgatgcggttggtggcatagatgtcaatgtcaagcaggcgtttgatggtgttaccaaagacgggccaggatccattcattttgatgcagggaaacagcatttagatggtacgaaagctttatcttatgcccgtgaaagacatagcgataacgatattatgcgtggattccgacaacaagaaattattcaagcagttgaagacaagttgaaatctggtcaatcaatcatgaaaataatggacattattgattcgttaaatggaaacattcaaactgatgtggattccaatgaattgactcatttagtcaaagaaggtttgacttggaccaattatgataaacaacagctttcttttgactggcgcacttttagtaatgaagggcgcagtatggttgaactatatccagatagtattgaaaatgtccgtcatcaattacgtgtgtctttaaatttagaaaagccagatgaacgagatcaagacggctatgtcttccatacgaacggtgaatttttatatcaaagtgattataccgttcaagatgaagcagctgaggaaaacgaaatgacttccatcaacggcaatacgtatattggtgttcctggcaatacacagaccggcccgttgccatcagttaaaacggaaaatggctttataaaataa

SEQ ID NO: 576 - protein, 374 aa, Enterococcus faecalis; identical to SEQ ID NO: 522

SEQ ID NO: 577 - DNA, 1125 bp, Enterococcus faecalis; identical to SEQ ID NO: 527

SEQ ID NO: 578 - protein, 374 aa, Enterococcus faecalis; identical to SEQ ID NO: 77

SEQ ID NO: 579 - DNA, 1125 bp, Enterococcus faecalis
atgagtaggaagcgaaaaatcagcttaattagtttagtcatcattttgttttttgtcacagtcggctcagcatactttgctgtagcgggtagctatttaaagaaaacaattgataaaggctatgttcccataaaaaatgattatactgaagcgcaaaataaagatagtcaatcgtttttgattatggggctagacaatacaattgaacggaaattaggcacaactaggactgatgctatgatggtgattaccgtgaataacaagacgaagaaaataacctatttaagtttgccacgggatagttttgttcaaattgatgcaaaaaattaccaagggatgcaacgaattgaagccgcctatacctacgatggaccaacagcttctgttaacacagttgagaaattattgaatattccaatcaatcattacgttgtgtttaactttttatcttttattaagttaattgatgcagttggcggcatagatgtcaatgtcaagcaggcgtttgatggtgtcaccaaagacgggccaggatccattcattttgatgcagggaaacagcatttagatggtacgaaagctttatcttatgcccgtgaaagacatagcgataacgatattatgcgtggattccgacaacaagaaattattcaagcagttgaagacaagttgaaatctggtcaatcaatcatgaaaataatggacattattgattcgttaaatggaaacattcaaactgatgtggattccaatgaattgactcatttagtcaaagaaggtttgacttggaccaattatgataaacaacagctttcttttgactggcgcacttttagtaatgaagggcgcagtatggttgaactatatccagatagtattgaaaatgtccgtcatcaattacgtgtgtctttaaatttagaaaagccagatgaacgagatcaagacggctatgtcttccatacgaacggtgaatttttatatcaaagtgattataccgttcaagatgaagcagctgaggaaaacgaaatgacttccatcaacggcaatacgtatattggtgttcctggcaatacacagactggcccgttaccatcagttaaaacggaaaatggctttataaaataa

SEQ ID NO: 580 - protein, 374 aa, Enterococcus faecalis
MSRKRKISLISLVIILFFVTVGSAYFAVAGSYLKKTIDKGYVPIKNDYTEAQNKDSQSFLIMGLDNTIERKLGTTRTDAMMVITVNNKTKKITYLSLPRDSFVQIDAKNYQGMQRIEAAYTYDGPTASVNTVEKLLNIPINHYVVFNFLSFIKLIDAVGGIDVNVKQAFDGVTKDGPGSIHFDAGKQHLDGTKALSYARERHSDNDIMRGFRQQEIIQAVEDKLKSGQSIMKIMDIIDSLNGNIQTDVDSNELTHLVKEGLTWTNYDKQQLSFDWRTFSNEGRSMVELYPDSIENVRHQLRVSLNLEKPDERDQDGYVFHTNGEFLYQSDYTVQDEAAEENEMTSINGNTYIGVPGNTQTGPLPSVKTENGFIK

SEQ ID NO: 581 - DNA, 1125 bp, Enterococcus faecalis; identical to SEQ ID NO: 527

SEQ ID NO: 582 - protein, 374 aa, Enterococcus faecalis; identical to SEQ ID NO: 77

SEQ ID NO: 583 - DNA, 1125 bp, Enterococcus faecalis; identical to SEQ ID NO: 513

SEQ ID NO: 584 - protein, 374 aa, Enterococcus faecalis; identical to SEQ ID NO: 77

SEQ ID NO: 585 - DNA, 1125 bp, Enterococcus faecalis; identical to SEQ ID NO: 517

SEQ ID NO: 586 - protein, 374 aa, Enterococcus faecalis; identical to SEQ ID NO: 77

SEQ ID NO: 587 - DNA, 1125 bp, Enterococcus faecalis
atgagtaggaagcgaaaaatcagcttaattagtttagtcatcattttgttttttgtcacagtcggctcagcatactttgctgtagcgggtagttatttaaagaaaacgattgataaaggctatgtccccataaaaaatgattatactgaagcgcaaaataaagatagtcaatcgtttttggtcatgggtctagacaatacaattgaacggaaattaggcacaactaggactgatgctatgatggtgattaccgtgaataacaagacgaagaaaataacctatttaagtttgccacgggatagttttgtgcaaattgatgcgaaaaattaccaagggatgcagcgaattgaagccgcctatacctacgatggaccaacagcttctgttaacaccgttgagaaattattgaatattccaatcaatcattacgttgtgtttaactttttatcttttattaagttaattgatgcagttggcggcatagatgtcaatgtcaagcaggcgtttgatggtgtcaccaaagacgggccaggatccattcattttgatgcagggaaacagcatttagatggtacgaaagctttatcttatgcccgtgaaagacatagcgataacgatattatgcgtggattccgacaacaagaaattattcaagcagttgaagacaagttgaaatctggtcaatcaatcatgaaaataatggacattattgattcgttaaatggaaacattcaaactgatgtggattccaatgaattgactcatttagtcaaagaaggtttgacttggaccaattatgataaacaacagctttcttttgactggcgcacttttagtaatgaagggcgcagtatggttgaactatatccagatagtattgaaaatgtccgtcatcaattacgtgtgtctttaaatttagaaaagccagatgaacgagatcaagacggctatgtcttccatacgaacggtgaatttttatatcaaagtgattataccgttcaagatgaagcagctgaggaaaacgaaatgacttctatcaacggcaatacgtatattggtgttcctggcaatacacagactggcccgttgccatcagttaaaacggaaaatggctttataaaataa

SEQ ID NO: 588 - protein, 374 aa, Enterococcus faecalis; identical to SEQ ID NO: 526

SEQ ID NO: 589 - DNA, 1125 bp, Enterococcus faecalis; identical to SEQ ID NO: 513

SEQ ID NO: 590 - protein, 374 aa, Enterococcus faecalis; identical to SEQ ID NO: 77

SEQ ID NO: 591 - DNA, 1125 bp, Enterococcus faecalis; identical to SEQ ID NO: 527

SEQ ID NO: 592 - protein, 374 aa, Enterococcus faecalis; identical to SEQ ID NO: 77

SEQ ID NO: 593 - DNA, 1125 bp, Enterococcus faecalis; identical to SEQ ID NO: 527

SEQ ID NO: 594 - protein, 374 aa, Enterococcus faecalis; identical to SEQ ID NO: 77

SEQ ID NO: 595 - DNA, 1125 bp, Enterococcus faecalis
atgagtaggaagcgaaaaatcagcttaattagtttagtcatcattttgttttttgtcacagtcggctcagcatactttgctgtagcaggtagctatttaaagaaaacgattgataaaggctatgttcccataaaaaatgattatgctgaggcgcaaaataaagatagtcaatcgtttttagtcatgggtttagacaatacgattgaacgaaaattaggcacaactaggacagatgctatgatggtgattaccgtgaataacaagacgaagaaaataacctatttaagtttgccacgggatagttttgttcaaattgatgcaaaaaattatcaagggatgcaacgaattgaagcagcctatacctacgacggaccgacagcttctgttaacacggttgaaaaattattgaatattccaatcaatcattacgttgtgtttaactttttatcttttattaagttaattgatgcggttggtggcatagatgtcaatgtcaagcaggcgtttgatggtgttaccaaagacggaccaggagccattcattttgatgcaggcaaacagcatttagatggtacgaaagctttatcttatgcccgtgaaagacatagcgataacgatattatgcgtggattccgacaacaagaaattattcaagcagttgaagacaagttgaaatccggtcaatccatcatgaaaataatggacattattgcttcgttaaatggaaatattcaaactgatgtggattccaacgaattgactcatttagtcaaagaaggtttgacttggaccaactatgataaacaacagctttcttttgactggcgcacttttagtaatgaagggcgcagtatggttgaactatatccagatagtattgaaaatgtccgtcatcaattacgtgtgtctttaaatttagaaaagccagatgaacgagatcaagacggctatgtcttccatacgaacggcgaatttttatatcaaagtgattataccgttcaagatgaagcagctgaggaaaacgaaatgacttccatcaacggcaatacgtatattggtgttcctggcaatacacagaccggcccgttgccatcagttaaaacggaaaatggctttataaaataa

SEQ ID NO: 596 - protein, 374 aa, Enterococcus faecalis
MSRKRKISLISLVIILFFVTVGSAYFAVAGSYLKKTIDKGYVPIKNDYAEAQNKDSQSFLVMGLDNTIERKLGTTRTDAMMVITVNNKTKKITYLSLPRDSFVQIDAKNYQGMQRIEAAYTYDGPTASVNTVEKLLNIPINHYVVFNFLSFIKLIDAVGGIDVNVKQAFDGVTKDGPGAIHFDAGKQHLDGTKALSYARERHSDNDIMRGFRQQEIIQAVEDKLKSGQSIMKIMDIIASLNGNIQTDVDSNELTHLVKEGLTWTNYDKQQLSFDWRTFSNEGRSMVELYPDSIENVRHQLRVSLNLEKPDERDQDGYVFHTNGEFLYQSDYTVQDEAAEENEMTSINGNTYIGVPGNTQTGPLPSVKTENGFIK

SEQ ID NO: 597 - DNA, 1125 bp, Enterococcus faecalis
atgagtaggaagcgaaaaatcagcttaattagtttagtcatcattttggtttttgtcacagtcggctcagcatactttgctgtagcgggtagctatttaaagaaaacaattgataaaggctatgttcccataaaaaatgattataatgaagcgcaaaataaagatagtcaatcgtttttgattatggggctagacaatacaattgaacggaaattaggcacaactaggactgatgctatgatggtgattaccgtgaataacaagacgaagaaaataacctatttaagtttgccacgggatagttttgtgcaaattgatgcgaaaaattaccaagggatgcagcgaattgaagccgcctatacctacgatggaccaacagcttctgttaacacagttgagaaattattgaatattccaatcaatcattacgttgtgtttaactttttatcttttattaagttaattgatgcagttggcggcatagatgtcaatgtcaagcaggcgtttgatggtgtcaccaaagacgggccaggatccattcattttgatgcagggaaacagcatttagatggtacgaaagctttatcttatgcccgtgaaagacatagcgataacgatattatgcgtggattccgacaacaagaaattattcaagcagttgaagacaagttgaaatctggtcaatcaatcatgaaaataatggacattattgattcgttaaatggaaacattcaaactgatgtggattccaatgaattgactcatttagtcaaagaaggtttgacttggaccaattatgataaacaacagctttcttttgactggcgcacttttagtaatgaagggcgcagtatggttgaactatatccagatagtattgaaaatgtccgtcatcaattacgtgtgtctttaaatttagaaaagccagatgaacgagatcaagacggctatgtcttccatacgaacggtgaatttttatatcaaagtgattataccgttcaagatgaagcagctgaggaaaacgaaatgacttccatcaacggcaatacgtatattggtgttcctggtaatacacagaccggcccgttgccatcagttaaaacggaaaatggctttataaaataa

SEQ ID NO: 598 - protein, 374 aa, Enterococcus faecalis; identical to SEQ ID NO: 77

SEQ ID NO: 599 - DNA, 1125 bp, Enterococcus faecalis; identical to SEQ ID NO: 527

SEQ ID NO: 600 - protein, 374 aa, Enterococcus faecalis; identical to SEQ ID NO: 77

SEQ ID NO: 601 - DNA, 1125 bp, Enterococcus faecalis; identical to SEQ ID NO: 57

SEQ ID NO: 602 - protein, 374 aa, Enterococcus faecalis; identical to SEQ ID NO: 77

SEQ ID NO: 603 - DNA, 672 bp, Enterococcus faecalis
atgagtaggaagcgaaaaatcagcttaattagtttagtcatcattttggtttttgtcacagtcggctcagcatactttgctgtagcgggtagctatttaaagaaaacaattgataaaggctatgttcccataaaaaatgattataatgaagcgcaaaataaagatagtcaatcgtttttgattatggggctagacaatacaattgaacggaaattaggcacaactaggactgatgctatgatggtgattaccgtgaataacaagacgaagaaaataacctatttaagtttgccacgggatagttttgttcaaattgatgcgaaaaattaccaagggatgcagcgaattgaagccgcctatacctacgatggaccaacagcttctgttaacacagttgagaaattattgaatattccaatcaatcattacgttgtgtttaactttttatcttttattaagttaattgatgcggttggcggcatagatgtcaatgtcaagcaggcgtttgatggtgtcaccaaagacgggccaggatccattcattttgatgcagggaaacagcatttagatggtacgaaagctttatcttatgcccgtgaaagacatagcgataacgatattatgcgtgattccgacaacaagaaattattcaagcagttgaagacaagttga

SEQ ID NO: 604 - protein, 223 aa, Enterococcus faecalis
MSRKRKISLISLVIILVFVTVGSAYFAVAGSYLKKTIDKGYVPIKNDYNEAQNKDSQSFLIMGLDNTIERKLGTTRTDAMMVITVNNKTKKITYLSLPRDSFVQIDAKNYQGMQRIEAAYTYDGPTASVNTVEKLLNIPINHYVVFNFLSFIKLIDAVGGIDVNVKQAFDGVTKDGPGSIHFDAGKQHLDGTKALSYARERHSDNDIMRDSDNKKLFKQLKTS

SEQ ID NO: 605 - DNA, 792 bp, Enterococcus faecalis
atggacttacatttaaccgttgatctaaaaaaaacaaagacactcattgacttagccgatcaggcccacttaatcattgaacaaacaactaaattaccgaaaaaagaggcagcgattcttttcttgctaagagataaccaactagttgctttaggacttgctgaagaaaaagctacatataaagaagtttcttttgatcactcgattttattgaaaccgacttgggacacagaacttgcctatttagcgcaagctttcctagatgatgcgaaagaaagtggtttaacattggaagcaaccccagcgacagtcaaaattccgaaaagtgcggtagcgacagtgactaactataaagaaacagtcacctttatcttggaacgttttggctactctctgtttaaaaaaccggcgccgaagaaagccagaccagccaaagcacgccacaaatggacaaaagaagtcagccaaattcctttttatattgatactcgacaaagcaaagcaactgttttttggcaaaagcgcaatgaaatgcttattaaagctggcgcgacaatgatgccagaagcccctttaaataaagacgggtctgtcggtttctccgctagatttggtgaaaaacttcgtgatgaacgcaagggccaatttaaagactttgtcacaacggaagatatcgtcttaaaaagcgttaatgaagtcggcttgtttctctattttgctggaacaaacagctggttagagctagttgatgagaacggcaaaaccttaaatgaatggactgtggtggaataa

SEQ ID NO: 606 - protein, 263 aa, Enterococcus faecalis
MDLHLTVDLKKTKTLIDLADQAHLIIEQTTKLPKKEAAILFLLRDNQLVALGLAEEKATYKEVSFDHSILLKPTWDTELAYLAQAFLDDAKESGLTLEATPATVKIPKSAVATVTNYKETVTFILERFGYSLFKKPAPKKARPAKARHKWTKEVSQIPFYIDTRQSKATVFWQKRNEMLIKAGATMMPEAPLNKDGSVGFSARFGEKLRDERKGQFKDFVTTEDIVLKSVNEVGLFLYFAGTNSWLELVDENGKTLNEWTVVE

SEQ ID NO: 607 - DNA, 792 bp, Enterococcus faecalis
atggacttacatttaaccgttgatctaaaaaaaacaaagacactcattgatttagccgatcaggcccacttaatcattgaacaaacaactaaattaccgaaaaaagaggcagcgattcttttcttgctaagagataaccaactagttgctttaggacttgctgaagaaaaagctacatataaagaagtttcttttgatcactcgattttgttgaaaccgacttgggacacagaacttgcctacttagcgcaagctttcctagatgatgcgaaagaaagtggtttaacattggaagcaaccccagcgacagtcaaaattccgaaaagtgcggtagcgacagtgactaactataaagaaacagtcacctttatcttggaacgttttggctactctctgtttaaaaaaccggcgccgaagaaagccagaccagccaaagcacgccacaaatggacaaaagaagttagccaaattcctttttatattgatactcgacaaagcaaagcaactgttttttggcaaaagcgcaatgaaatgcttattaaagctggcgcgacaatgatgcccgaagcccctttaaataaagacgggtctgtcggtttctccgctagatttggtgaaaaacttcgtgatgaacgcaagggccaatttaaagactttgtcacaacggaagatatcgtcttaaaaagcgttaatgaagtcggcttgtttctctattttgctggaacaaacagctggttagagctagttgatgagaacggcaaaaccttaaatgaatggactgtggtggaataa

SEQ ID NO: 608 - protein, 263 aa, Enterococcus faecalis; identical to SEQ ID NO: 606

SEQ ID NO: 609 - DNA, 792 bp, Enterococcus faecalis
atggacttacatttaaccgttgatctaaaaaaaacaaagacactcattgatttagccgatcaggcccacttaatcattgaacaaacaactaaattaccgaaaaaagaggcagcgattcttttcttgctaagagataaccaactagttgctttaggacttgctgaagaaaaagctacatataaagaagtttcttttgatcactcgattttattgaaaccgacttgggacacagaacttgcctatttagcgcaagctttcctagatgatgcgaaagaaagtggtttaacattggaagcaaccccagcgacagtcaaaattccgaaaagtgcggtagcgacagtgactaactataaagaaacagtcacctttatcttggaacgttttggctactctctgtttaaaaaaccggcgccgaagaaagccagaccagccaaagcacgccacaaatggacaaaagaagtcagccaaattcctttttatattgatactcgacaaagcaaagcaactgttttttggcaaaagcgcaatgaaatgcttattaaagctggcgcgacaatgatgccagaagcccctttaaataaagacgggtctgtcggtttctccgctagatttggtgaaaaacttcgtgatgaacgcaagggccaatttaaagactttgtcacaacggaagatatcgtcttaaaaagcgttaatgaagtcggcttgtttctctattttgctggaacaaacagctggttagagctagttgatgagaacggcaaaaccttaaatgaatggactgtggtggaataa

SEQ ID NO: 610 - protein, 263 aa, Enterococcus faecalis; identical to SEQ ID NO: 606

SEQ ID NO: 611 - DNA, 792 bp, Enterococcus faecalis; identical to SEQ ID NO: 605

SEQ ID NO: 612 - protein, 263 aa, Enterococcus faecalis; identical to SEQ ID NO: 606

SEQ ID NO: 613 - DNA, 792 bp, Enterococcus faecalis
atggacttacatttaaccgttgatctaaaaaaaacaaagacactcattgacttagccgatcaggcccacttaatcattgaacaaacaactaaattaccgaaaaaagaggcagcgattcttttcttgctaagagataaccaactagttgctttaggacttgctgaagaaaaagctacatataaagaagtttcttttgatcactcgattttattgaaaccgacttgggacacagaacttgcctatttagcgcaagctttcctagatgatgcgaaagaaagtggtttaacattggaagcaaccccaacgacagtcaaaattccgaaaagtgcggtagcgacagtgactaactataaagaaacagtcacctttatcttggaacgttttggctactctctgtttaataaaccggcgccgaagaaagccagaccagccaaagcacgccacaaatggacaaaagaagttagccaaattcctttttatattgatactcgacaaagtaaagcaactgttttttggcaaaagcgcaatgaaatgcttattaaagctggcgcgacaatgatgccagaagcccctttaaataaagacgggtctgtcggtttctccgccagatttggtgaaaaacttcgtgatgaacgcaagggccaatttaaagactttgtcacaacggaagatatcgtcttaaaaagcgttaatgaagtcggcttgtttctctattttgctggaacaaacagctggttagagctagttgatgagaacggcaaaactttaaatgaatggactgtggtggaataa

SEQ ID NO: 614 - protein, 263 aa, Enterococcus faecalis
MDLHLTVDLKKTKTLIDLADQAHLIIEQTTKLPKKEAAILFLLRDNQLVALGLAEEKATYKEVSFDHSILLKPTWDTELAYLAQAFLDDAKESGLTLEATPTTVKIPKSAVATVTNYKETVTFILERFGYSLFNKPAPKKARPAKARHKWTKEVSQIPFYIDTRQSKATVFWQKRNEMLIKAGATMMPEAPLNKDGSVGFSARFGEKLRDERKGQFKDFVTTEDIVLKSVNEVGLFLYFAGTNSWLELVDENGKTLNEWTVVE

SEQ ID NO: 615 - DNA, 792 bp, Enterococcus faecalis; identical to SEQ ID NO: 605

SEQ ID NO: 616 - protein, 263 aa, Enterococcus faecalis; identical to SEQ ID NO: 606

SEQ ID NO: 617 - DNA, 792 bp, Enterococcus faecalis
atggacttacatttaaccgttgatctaaaaaaaacaaagacactcattgatttagccgatcaggcccacttaatcattgaacaaacaactaaattaccgaaaaaagaggcagcgattcttttcttgctaagagataaccaactagttgctttaggacttgctgaagaaaaagctacatataaagaagtttcttttgatcactcgattttattgaaaccgacttgggacacagaacttgcctatttagcgcaagctttcctagatgatgcgaaagaaagtggtttaacattggaagcaaccccaacgacagtcaaaattccgaaaagtgcggtagcgacagtgactaactataaagaaacagtcacctttatcttggaacgttttggctactctctgtttaaaaaaccggcgccgaagaaagccagaccagccaaagcacgccacaaatggacaaaagaagttagccaaattcctttttatattgatactcgacaaagcaaagcaactgttttttggcaaaagcgcaatgaaatgcttattaaagctggcgcgacaatgatgccagaagcccctttaaataaagacgggtctgtcggtttctccgctagatttggtgaaaaacttcgtgatgaacgcaagggccaatttaaagactttgtcacaacggaagatatcgtcttaaaaagcgttaatgaagtcggcttgtttctctattttgctggaacaaacagctggttagagctagttgatgagaacggcaaaaccttaaatgaatggactgtggtggaataa

SEQ ID NO: 618 - protein, 263 aa, Enterococcus faecalis
MDLHLTVDLKKTKTLIDLADQAHLIIEQTTKLPKKEAAILFLLRDNQLVALGLAEEKATYKEVSFDHSILLKPTWDTELAYLAQAFLDDAKESGLTLEATPTTVKIPKSAVATVTNYKETVTFILERFGYSLFKKPAPKKARPAKARHKWTKEVSQIPFYIDTRQSKATVFWQKRNEMLIKAGATMMPEAPLNKDGSVGFSARFGEKLRDERKGQFKDFVTTEDIVLKSVNEVGLFLYFAGTNSWLELVDENGKTLNEWTVVE

SEQ ID NO: 619 - DNA, 792 bp, Enterococcus faecalis; identical to SEQ ID NO: 617

SEQ ID NO: 620 - protein, 263 aa, Enterococcus faecalis; identical to SEQ ID NO: 618

SEQ ID NO: 621 - DNA, 792 bp, Enterococcus faecalis
atggacttacatttaaccgttgatctaaaaaaaacaaaaacactcattgacttagccgatcaggcccacttaatcattgaacaaacaactaaattaccgaaaaaagaggcagcgattcttttcttgctaagagataaccaactagttgctttaggacttgctgaagaaaaagctacatataaagaagtttcttttgatcactcgattttattgaaaccgacttgggacacagaacttgcctatttagcgcaagctttcctagatgatgcgaaagaaagtggtttaacattggaagcgaccccaacgacagtcaaaattccgaaaagtgcggtagcgacagtgactaactataaagaaacagtcacctttatcttggaacgttttggctactctctgtttaaaaaaccggcgccgaagaaagccagaccagccaaagcacgccacaaatggacaaaagaagtcagccaaattcctttttatattgatactcgacaaagcaaagcaactgttttttggcaaaagcgcaatgaaatgcttattaaagctggcgcgacaatgatgcccgaagcccctttaaataaagacgggtctgtcggtttctccgctagatttggtgaaaaacttcgtgatgaacgcaagggccaatttaaagactttgtcacaacggaagatatcgtcttaaaaagcgttaatgaagtcggcttgtttctctattttgctggaacaaacagctggttagagctagctgatgagaacggcaaaaccttaaatgaatggactgtggtggaataa

SEQ ID NO: 622 - protein, 263 aa, Enterococcus faecalis
MDLHLTVDLKKTKTLIDLADQAHLIIEQTTKLPKKEAAILFLLRDNQLVALGLAEEKATYKEVSFDHSILLKPTWDTELAYLAQAFLDDAKESGLTLEATPTTVKIPKSAVATVTNYKETVTFILERFGYSLFKKPAPKKARPAKARHKWTKEVSQIPFYIDTRQSKATVFWQKRNEMLIKAGATMMPEAPLNKDGSVGFSARFGEKLRDERKGQFKDFVTTEDIVLKSVNEVGLFLYFAGTNSWLELADENGKTLNEWTVVE

SEQ ID NO: 623 - DNA, 792 bp, Enterococcus faecalis
atggacttacatttaaccgttgatctaaaaaaaacaaagacactcattgacttagccgatcaggcccacttaatcattgaacaaacaactaaattaccgaaaaaagaggcagcgattcttttcttgctaagagataaccaactagttgctttaggacttgctgaagaaaaagctacatataaagaagtttcttttgatcactcgattttattgaaaccgacttgggacacagaacttgcctatttagcgcaagctttcctagatgatgcgaaagaaagtggtttaacattggaagcaaccccagcgacagtcaaaattccgaaaagtgcggtagcgacagtgactaactataaagaaacagtcacctttatcttggaacgttttggctactctctgtttaaaaaaccggcgccgaagaaagccagaccagccaaagcacgccacaaatggacaaaagaagtcagccaaattcctttttatattgatactcgacaaagcaaagcaactgttttttggcaaaagcgcaatgaaatgcttattaaagctggcgcgacaatgatgccagaagcccctttaaataaagacgggtctgtcggtttctccgctagatttggtgaaaaacttcgtgatgaacgcaagggccaatttaaagactttgtcacaacggaagatatcgtcttaaaaagcgttaatgaagtcggcttgtttctctattttgctggaacaaacagctggttagagctagttgatgagaacggcaaaaccttaaatgaatggactgcggtggaataa

SEQ ID NO: 624 - protein, 263 aa, Enterococcus faecalis
MDLHLTVDLKKTKTLIDLADQAHLIIEQTTKLPKKEAAILFLLRDNQLVALGLAEEKATYKEVSFDHSILLKPTWDTELAYLAQAFLDDAKESGLTLEATPATVKIPKSAVATVTNYKETVTFILERFGYSLFKKPAPKKARPAKARHKWTKEVSQIPFYIDTRQSKATVFWQKRNEMLIKAGATMMPEAPLNKDGSVGFSARFGEKLRDERKGQFKDFVTTEDIVLKSVNEVGLFLYFAGTNSWLELVDENGKTLNEWTAVE

SEQ ID NO: 625 - DNA, 792 bp, Enterococcus faecalis
atggacttacatttaaccgttgatctaaaaaaaacaaagacactcattgatttagccgatcaggcccacttaatcattgaacaaacaactaaattaccgaaaaaagaggcagcgattcttttcttgctaagagataaccaactagttgctttaggacttgctgaagaaaaagctacatataaagaagtttcttttgatcactcgattttattgaaaccgacttgggacacagaacttgcctatttagcgcaagctttcctagatgatgcgaaagaaagtggtttaacattggaagcaaccccagcgacagtcaaaattccgaaaagtgcggtagcgacagtgactaactataaagaaacagtcacctttatcttggaacgttttggctactctctgtttaaaaaaccggcgccgaagaaagccagaccagccaaagcacgccacaaatggacaaaagaagtcagccaaattcctttttatattgatactcgacaaagcaaagcaactgttttttggcaaaagcgcaatgaaatgcttattaaagctggcgcaacaatgatgccagaagtccctttaaataaagacgggtctgtcggtttctccgctagatttggtgaaaaacttcgtgatgaacgcaagggccaatttaaagactttgtcacaacggaagatatcgtcttaaaaagcgttaatgaagtcggcttgtttctctattttgctggaacaaacagctggttagagctagttgatgagaacggcaaaaccttaaatgaatggactgtggtggaataa

SEQ ID NO: 626 - protein, 263 aa, Enterococcus faecalis
MDLHLTVDLKKTKTLIDLADQAHLIIEQTTKLPKKEAAILFLLRDNQLVALGLAEEKATYKEVSFDHSILLKPTWDTELAYLAQAFLDDAKESGLTLEATPATVKIPKSAVATVTNYKETVTFILERFGYSLFKKPAPKKARPAKARHKWTKEVSQIPFYIDTRQSKATVFWQKRNEMLIKAGATMMPEVPLNKDGSVGFSARFGEKLRDERKGQFKDFVTTEDIVLKSVNEVGLFLYFAGTNSWLELVDENGKTLNEWTVVE

SEQ ID NO: 627 - DNA, 792 bp, Enterococcus faecalis; identical to SEQ ID NO: 605

SEQ ID NO: 628 - protein, 263 aa, Enterococcus faecalis; identical to SEQ ID NO: 606

SEQ ID NO: 629 - DNA, 792 bp, Enterococcus faecalis; identical to SEQ ID NO: 605

SEQ ID NO: 630 - protein, 263 aa, Enterococcus faecalis; identical to SEQ ID NO: 606

SEQ ID NO: 631 - DNA, 792 bp, Enterococcus faecalis
atggacttacatttaaccgttgatctaaaaaaaacaaagacactcattgacttagccgatcaggcccacttaatcattgaacaaacaactaaattaccgaaaaaagaggcagcgattcttttcttgctaagagataaccaactagttgctttaggacttgctgaagaaaaagctacatataaagaagtttcttttgatcactcgattttattgaaaccgacttgggacacagaacttgcctatttagcgcaagctttcctagatgatgcgaaagaaagtggtttaacattggaagcaaccccagcgacagtcaaaattccgaaaagtgcggcagcgacagtgactaactataaagaaacagtcacctttatcttggaacgttttggctactctctgtttaaaaaaccggcgccgaagaaagccagaccagccaaagcacgccacaaatggacaaaagaagtcagccaaattcctttttatattgatactcgacaaagcaaagcaactgttttttggcaaaagcgcaatgaaatgcttattaaagctggcgcgacaatgatgccagaagcccctttaaataaagacgggtctgtcggtttctccgctagatttggtgaaaaacttcgtgatgaacgcaagggccaatttaaagactttgtcacaacggaagatatcgtcttaaaaagcgttaatgaagtcggcttgtttctctattttgctggaacaaacagctggttagagctagttgatgagaacggcaaaactttaaatgaatggactgtggtggaataa

SEQ ID NO: 632 - protein, 263 aa, Enterococcus faecalis
MDLHLTVDLKKTKTLIDLADQAHLIIEQTTKLPKKEAAILFLLRDNQLVALGLAEEKATYKEVSFDHSILLKPTWDTELAYLAQAFLDDAKESGLTLEATPATVKIPKSAAATVTNYKETVTFILERFGYSLFKKPAPKKARPAKARHKWTKEVSQIPFYIDTRQSKATVFWQKRNEMLIKAGATMMPEAPLNKDGSVGFSARFGEKLRDERKGQFKDFVTTEDIVLKSVNEVGLFLYFAGTNSWLELVDENGKTLNEWTVVE

SEQ ID NO: 633 - DNA, 792 bp, Enterococcus faecalis
atggacttacatttaaccgttgatctaaaaaaaacaaagacactcattgatttagccgatcaggcccacttaatcattgaacaaacaactaaattaccgaaaaaagaggcagcgattcttttcttgctaagagataaccaactagttgctttaggacttgctgaagaaaaagctacatataaagaagtttcttttgatcactcgattttattgaaaccgacttgggacacagaacttgcctatttagcgcaagctttcctagatgatgcgaaagaaagtggtttaacattggaagcaaccccagcgacagtcaaaattccgaaaagtgcggtagcgacagtgactaactataaagaaacagtcacctttatcttggaacgttttggctactctctgtttaaaaaaccggcgccgaagaaagccagaccagccaaagcacgccacaaatggacaaaagaagtcagccaaattcctttttatattgatactcgacaaagcaaagcaactgttttttggcaaaagcgcaatgaaatgcttattaaagctggcgcaacaatgatgccagaagtccctttaaataaagacgggtctgtcggtttctccgctagatttggtgaaaaacttcgtgatgaacgcaagggccaatttaaagactttgtcacaacggaagatatcgtcttaaaaagcgttaatgaagtcggcttgtttctctattttgctggaacaaacagctggttagagctagttgatgagaacggcaaaactttaaatgaatggactgtggtggaataa

SEQ ID NO: 634 - protein, 263 aa, Enterococcus faecalis; identical to SEQ ID NO: 626

SEQ ID NO: 635 - DNA, 792 bp, Enterococcus faecalis; identical to SEQ ID NO: 605

SEQ ID NO: 636 - protein, 263 aa, Enterococcus faecalis; identical to SEQ ID NO: 606

SEQ ID NO: 637 - DNA, 792 bp, Enterococcus faecalis
atggacttacatttaaccgttgatctaaaaaaaacaaagacactcattgacttagccgatcaggcccacttaatcattgaacaaacaactaaattaccgaaaaaagaggcagcgattcttttcttgctaagagataaccaactagttgctttaggacttgctgaagaaaaagctacatataaagaagtttcttttgatcactcgattttattgaaaccgacttgggacacagaacttgcctatttagcgcaagctttcctagatgatgcgaaagaaagtggtttaacattggaagcaaccccaacgacagtcaaaattccgaaaagtgcggtagcgacagtgactaactataaagaaacagtcacctttatcttggaacgttttggctactctctgtttaaaaaaccggcgccgaagaaagccagaccagccaaagcacgccacaaatggacaaaagaagtcagccaaattcctttttatattgatactcgacaaagcaaagcaactgttttttggcaaaagcgcaatgaaatgcttattaaagctggcgcaacaatgatgccagaagtccctttaaataaagacgggtctgtcggtttctccgctagatttggtgaaaaacttcgtgatgaacgcaagggccaatttaaagactttgtcacaacggaagatatcgtcttaaaaagcgttaatgaagtcggcttgtttctctattttgctggaacaaacagctggttagagctagttgatgagaacggcaaaactttaaatgaatggactgtggtggaataa

SEQ ID NO: 638 - protein, 263 aa, Enterococcus faecalis
MDLHLTVDLKKTKTLIDLADQAHLIIEQTTKLPKKEAAILFLLRDNQLVALGLAEEKATYKEVSFDHSILLKPTWDTELAYLAQAFLDDAKESGLTLEATPTTVKIPKSAVATVTNYKETVTFILERFGYSLFKKPAPKKARPAKARHKWTKEVSQIPFYIDTRQSKATVFWQKRNEMLIKAGATMMPEVPLNKDGSVGFSARFGEKLRDERKGQFKDFVTTEDIVLKSVNEVGLFLYFAGTNSWLELVDENGKTLNEWTVVE

SEQ ID NO: 639 - DNA, 792 bp, Enterococcus faecalis
atggacttacatttaaccgttgatctaaaaaaaacaaagacactcattgatttagccgatcaggcccacttaatcattgaacaaacaactaaattaccgaaaaaagaggcagcgattcttttcttgctaagagataaccaactagttgctttaggacttgctgaagaaaaagctacatataaagaagtttcttttgatcactcgattttgttgaaaccgacttgggacacagaacttgcctatttagcgcaagctttcctagatgatgcgaaagaaagtggtttaacattggaagcaaccccagcgacagtcaaaattccgaaaagtgcggtagcgacagtgactaactataaagaaacagtcacctttatcttggaacgttttggctactctctgtttaaaaaaccggcgccgaagaaagccagaccagccaaagcacgccacaaatggacaaaagaagtcagccaaattcctttttatattgatactcgacaaagcaaagcaacagttttttggcaaaagcgcaatgaaatgcttattaaagctggcgcgacaatgatgcccgaagcccctttaaataaagacgggtctgtcggtttctccgccagatttggtgaaaaacttcgtgatgaacgcaagggccaatttaaagactttgtcacaacggaagatatcgtcttaaaaagcgttaatgaagtcggcttgtttctctattttgctggaacaaacagctggttagagctagttgatgagaacggcaaaaccttaaatgaatggactgtggtggaataa

SEQ ID NO: 640 - protein, 263 aa, Enterococcus faecalis; identical to SEQ ID NO: 606

SEQ ID NO: 641 - DNA, 792 bp, Enterococcus faecalis
atggacttacatttaaccgttgatctaaaaaaaacaaagacactcattgatttagccgatcaggcccacttaatcattgaacaaacaactaaattaccgaaaaaagaggcagcgattcttttcttgctaagagataaccaactagttgctttaggacttgctgaagaaaaagctacatataaagaagtttcttttgatcactcgattttattgaaaccgacttgggacacagaacttgcctatttagcgcaagctttcctagatgatgcgaaagaaagtggtttaacattggaagcaaccccaacgacagtcaaaattccgaaaagtgcggtagcgacagtgactaactataaagaaacagtcacctttatcttggaacgttttggctactctctgtttaaaaaaccggcgccgaagaaagccagaccagccaaagcacgccacaaatggacaaaagaagtcagccaaattcctttttatattgatactcgacaaagcaaagcaactgttttttggcaaaagcgcaatgaaatgcttattaaagctggcgcgacaatgatgcccgaagcccctttaaataaagacgggtctgtcggtttctccgctagatttggtgaaaaacttcgtgatgaacgcaagggccaatttaaagactttgtcacaacggaagatatcgtcttaaaaagcgttaatgaagtcggcttgtttctctattttgctggaacaaacagctggttagagctagttgatgagaacggcaaaaccttaaatgaatggactgtggtggaataa

SEQ ID NO: 642 - protein, 263 aa, Enterococcus faecalis; identical to SEQ ID NO: 618

SEQ ID NO: 643 - DNA, 792 bp, Enterococcus faecalis; identical to SEQ ID NO: 605

SEQ ID NO: 644 - protein, 263 aa, Enterococcus faecalis; identical to SEQ ID NO: 606

SEQ ID NO: 645 - DNA, 792 bp, Enterococcus faecalis; identical to SEQ ID NO: 617

SEQ ID NO: 646 - protein, 263 aa, Enterococcus faecalis; identical to SEQ ID NO: 618

SEQ ID NO: 647 - DNA, 792 bp, Enterococcus faecalis; identical to SEQ ID NO: 605

SEQ ID NO: 648 - protein, 263 aa, Enterococcus faecalis; identical to SEQ ID NO: 606

SEQ ID NO: 649 - DNA, 792 bp, Enterococcus faecalis
atggacttacatttaaccgttgatctaaaaaaaacaaagacactcattgatttagccgatcaggcccacttaatcattgaacaaacaactaaattaccgaaaaaagaggcagcgattcttttcttgctaagagataaccaactagttgctttaggacttgctgaagaaaaagctacatataaagaagtttcttttgatcactcgattttattgaaaccgacttgggacacagaacttgcctatttagcgcaagctttcctagatgatgcgaaagaaagtggtttaacattggaagcaaccccaacgacagtcaaaattccgaaaagtgcggtagcgacagtgactaactataaagaaacagtcacctttatcttggaacgttttggctactctctgtttaaaaaaccggcgccgaagaaagccagaccagccaaagcacgccacaaatggacaaaagaagtcagccaaattcctttttatattgatactcgacaaagcaaagcaactgttttttggcaaaagcgcaatgaaatgcttattaaagctggcgcgacaatgatgcccgaagcccctttaaataaagacgggtctgtcggtttctccgctagatttggtgaaaaacttcgtgatgaacgcaagggccaatttaaagactttgtcacaacggaagatatcgtcttaaaaagcgttaatgaagtcggcttgtttctctattttgctggaacaaacagctggttagagctagttgatgagaacggcaaaactttaaatgaatggactgtggtggaataa

SEQ ID NO: 650 - protein, 263 aa, Enterococcus faecalis; identical to SEQ ID NO: 618

SEQ ID NO: 651 - DNA, 792 bp, Enterococcus faecalis; identical to SEQ ID NO: 633

SEQ ID NO: 652 - protein, 263 aa, Enterococcus faecalis; identical to SEQ ID NO: 626

SEQ ID NO: 653 - DNA, 792 bp, Enterococcus faecalis; identical to SEQ ID NO: 59

SEQ ID NO: 654 - protein, 263 aa, Enterococcus faecalis; identical to SEQ ID NO: 35

SEQ ID NO: 655 - DNA, 792 bp, Enterococcus faecalis
atggacttacatttaaccgttgatctaaaaaaaacaaagacactcattgatttagccgatcaggcccacttaatcattgaacaaacaactaaattaccgaaaaaagaggcagcgattcttttcttgctaagagataaccaactagttgctttaggacttgctgaagaaaaagctacatataaagaagtttcttttgatcactcgattttgttgaaaccgacttgggacacagaacttgcctatttagcgcaagctttcctagatgatgcgaaagaaagtggtttaacattggaagcaaccccaacgacagtcaaaattccgaaaagtgcggtagcgacagtgactaactataaagaaacagtcacctttatcttggaacgttttggctactctctgtttaaaaaaccggcgccgaaaaaagccagaccagccaaagcacgccacaaatggacaaaagaagttagccaaattcctttttatattgatactcgacaaagcaaagcaactgttttttggcaaaagcgcaatgaaatgcttattaaagctggcgcgacaatgatgccagaagcccctttaaataaagacgggtctgtcggtttctccgctagatttggtgaaaaacttcgtgatgaacgcaagggccaatttaaaaactttgtcacaacggaagatatcgtcttaaaaagcgttaatgaagtcggcttgtttctctattttgctggaacaaacagctggttagagctagttgatgagaacggcaaaaccttaaatgaatggactgtggtggaataa

SEQ ID NO: 656 - protein, 263 aa, Enterococcus faecalis
MDLHLTVDLKKTKTLIDLADQAHLIIEQTTKLPKKEAAILFLLRDNQLVALGLAEEKATYKEVSFDHSILLKPTWDTELAYLAQAFLDDAKESGLTLEATPTTVKIPKSAVATVTNYKETVTFILERFGYSLFKKPAPKKARPAKARHKWTKEVSQIPFYIDTRQSKATVFWQKRNEMLIKAGATMMPEAPLNKDGSVGFSARFGEKLRDERKGQFKNFVTTEDIVLKSVNEVGLFLYFAGTNSWLELVDENGKTLNEWTVVE

SEQ ID NO: 657 - DNA, 792 bp, Enterococcus faecalis; identical to SEQ ID NO: 617

SEQ ID NO: 658 - protein, 263 aa, Enterococcus faecalis; identical to SEQ ID NO: 618

SEQ ID NO: 659 - DNA, 792 bp, Enterococcus faecalis; identical to SEQ ID NO: 631

SEQ ID NO: 660 - protein, 263 aa, Enterococcus faecalis; identical to SEQ ID NO: 632

SEQ ID NO: 661 - DNA, 792 bp, Enterococcus faecalis
atggacttacatttaaccgttgatctaaaaaaaacaaagacactcattgacttagccgatcaggcccacttaatcattgaacaaacaactaaattaccgaaaaaagaggcagcgattcttttcttgctaagagataaccaactagttgctttaggacttgctgaagaaaaagctacatataaagaagtttcttttgatcactcgattttattgaaaccgacttgggacacagaacttgcctatttagcgcaagctttcctagatgatgcgaaagaaagtggtttaacattggaagcgactccaacgacagtcaaaattccgaaaagtgcggtagcgacagtgactaactataaagaaacagtcacctttatcttggaacgttttggctactctctgtttaaaaaaccggcgccgaagaaagccagaccagccaaagcacgccacaaatggacaaaagaagttagccaaattcctttttatattgatactcgacaaagtaaagcaactgttttttggcaaaagcgcaatgaaatgcttattaaagctggcgcgacaatgatgccagaagcccctttaaataaagacgggtctgtcggtttctccgccagatttggtgaaaaacttcgtgatgaacgcaagggccaatttaaagactttgtcacaacggaagatatcgtcttaaaaagcgttaatgaagtcggcttgtttctctattttgctggaacaaacagctggttagagctagttgatgagaacggcaaaaccttaaatgaatggactgtggtggaataa

SEQ ID NO: 662 - protein, 263 aa, Enterococcus faecalis; identical to SEQ ID NO: 618

SEQ ID NO: 663 - DNA, 792 bp, Enterococcus faecalis
atggacttacatttaaccgttgatctaaaaaaaacaaagacactcattgatttagccgatcaggcccacttaatcattgaacaaacaactaaattaccgaaaaaagaggcagcgattcttttcttgctaagagataaccaactagttgctttaggacttgctgaagaaaaagctacatataaagaagtttcttttgatcactcgattttattgaaaccgacttgggacacagaacttgcctatttagcgcaagctttcctagatgatgcgaaagaaagtggtttaacattggaagcaaccccaacgacagtcaaaattccgaaaagtgcggtagcgacagtgactaactataaagaaacagtcacctttatcttggaacgttttggctactctctgtttaaaaaaccggcgccgaagaaagccagaccagccaaagcacgccacaaatggacaaaagaagtcagccaaattcctttttatattgatactcgacaaagcaaagcaactgttttttggcaaaagcgcaatgaaatgcttattaaagctggcgcaacaatgatgccagaagcccctttaaataaagacgggtctgtcggtttctccgctagatttggtgaaaaacttcgtgatgaacgcaagggccaatttaaagactttgtcacaatggaagatatcgtcttaaaaagcgttaatgaagtcggcttgtttctctattttgctggaacaaacagctggttagagctagttgatgagaacggcaaaaccttaaatgaatggactgtggtggaataa

SEQ ID NO: 664 - protein, 263 aa, Enterococcus faecalis
MDLHLTVDLKKTKTLIDLADQAHLIIEQTTKLPKKEAAILFLLRDNQLVALGLAEEKATYKEVSFDHSILLKPTWDTELAYLAQAFLDDAKESGLTLEATPTTVKIPKSAVATVTNYKETVTFILERFGYSLFKKPAPKKARPAKARHKWTKEVSQIPFYIDTRQSKATVFWQKRNEMLIKAGATMMPEAPLNKDGSVGFSARFGEKLRDERKGQFKDFVTMEDIVLKSVNEVGLFLYFAGTNSWLELVDENGKTLNEWTVVE

SEQ ID NO: 665 - DNA, 792 bp, Enterococcus faecalis; identical to SEQ ID NO: 631

SEQ ID NO: 666 - protein, 263 aa, Enterococcus faecalis; identical to SEQ ID NO: 632

SEQ ID NO: 667 - DNA, 792 bp, Enterococcus faecalis
atggacttacatttaaccgttgatctaaaaaaaacaaagacactcattgacttagccgatcaggcccacttaatcattgaacaaacaactaaattaccgaaaaaagaggcagcgattcttttcttgctaagagataaccaactagttgctttaggacttgctgaagaaaaagctacatataaagaagtttcttttgatcactcgattttattgaaaccgacttgggacacagaacttgcctatttagcgcaagctttcctagatgatgcgaaagaaagtggtttaacattggaagcgaccccaacgacagtcaaaattccgaaaagtgcggtagcgacagtgactaactataaagaaacagtcacctttatcttggaacgttttggctactctctgtttaaaaaaccggcgccgaagaaagccagaccagccaaagcacgccacaaatggacaaaagaagtcagccaaattcctttttatattgatactcgacaaagcaaagcaactgttttttggcaaaagcgcaatgaaatgcttattaaagctggcgcgacaatgatgcccgaagcccctttaaataaagacgggtctgtcggtttctccgctagatttggtgaaaaacttcgtgatgaacgcaagggccaatttaaagactttgtcacaacggaagatatcgtcttaaaaagcgttaatgaagtcggcttgtttctctattttgctggaacaaacagctggttagagctagttgatgagaacggcaaaaccttaaatgaatggactgtggtggaataa

SEQ ID NO: 668 - protein, 263 aa, Enterococcus faecalis; identical to SEQ ID NO: 618

SEQ ID NO: 669 - DNA, 792 bp, Enterococcus faecalis; identical to SEQ ID NO: 631

SEQ ID NO: 670 - protein, 263 aa, Enterococcus faecalis; identical to SEQ ID NO: 632

SEQ ID NO: 671 - DNA, 792 bp, Enterococcus faecalis; identical to SEQ ID NO: 605

SEQ ID NO: 672 - protein, 263 aa, Enterococcus faecalis; identical to SEQ ID NO: 606

SEQ ID NO: 673 - DNA, 792 bp, Enterococcus faecalis
atggacttacatttaaccgttgatctaaaaaaaacaaagacactcattgacttagccgatcaggcccacttaatcattgaacaaacaactaaattaccgaaaaaagaggcagcgattcttttcttgctaagagataaccaactagttgctttaggacttgctgaagaaaaagctacatataaagaagtttcttttgatcactcgattttattgaaaccgacttgggacacagaacttgcctatttagcgcaagctttcctagatgatgcgaaagaaagtggtttaacattggaagcaaccccagcgacagtcaaaattccgaaaagtgcggtagcgacagtgactaactataaagaaacagtcacctttatcttggaacgttttggctactctctgtttaaaaaaccggcgccgaagaaagccagaccagccaaagcacgccacaaatggacaaaagaagtcagccaaattcctttttatattgatactcgacaaagcaaagcaactgttttttggcaaaagcgcaatgaaatgcttattaaagctggcgcgacaatgatgccagaagcccctttaaataaagacgggtctgtcggtttctccgctagatttgatgaaaaacttcgtgatgaacgcaagggccaatttaaagactttgtcacaacggaagatatcgtcttaaaaagcgttaatgaagtcggcttgtttctctattttgctggaacaaacagctggttagagctagttgatgagaacggcaaaaccttaaatgaatggactgtggtggaataa

SEQ ID NO: 674 - protein, 263 aa, Enterococcus faecalis
MDLHLTVDLKKTKTLIDLADQAHLIIEQTTKLPKKEAAILFLLRDNQLVALGLAEEKATYKEVSFDHSILLKPTWDTELAYLAQAFLDDAKESGLTLEATPATVKIPKSAVATVTNYKETVTFILERFGYSLFKKPAPKKARPAKARHKWTKEVSQIPFYIDTRQSKATVFWQKRNEMLIKAGATMMPEAPLNKDGSVGFSARFDEKLRDERKGQFKDFVTTEDIVLKSVNEVGLFLYFAGTNSWLELVDENGKTLNEWTVVE

SEQ ID NO: 675 - DNA, 792 bp, Enterococcus faecalis; identical to SEQ ID NO: 605

SEQ ID NO: 676 - protein, 263 aa, Enterococcus faecalis; identical to SEQ ID NO: 606

SEQ ID NO: 677 - DNA, 792 bp, Enterococcus faecalis; identical to SEQ ID NO: 631

SEQ ID NO: 678 - protein, 263 aa, Enterococcus faecalis; identical to SEQ ID NO: 632

SEQ ID NO: 679 - DNA, 792 bp, Enterococcus faecalis; identical to SEQ ID NO: 631

SEQ ID NO: 680 - protein, 263 aa, Enterococcus faecalis; identical to SEQ ID NO: 632

SEQ ID NO: 681 - DNA, 792 bp, Enterococcus faecalis
atggacttacatttaaccgttgatctaaaaaaaacaaagacactcattgaattagccgatcaggcccacttaatcattgaacaaacaactaaattaccgcaaaaagaggcagcgattcttttcttgctaagagacaaccaactagttgctttaggacttgctgaagaaaaagctacatacaaagaagtttcttttgatcactcgattttattgaaaccgacttgggacacagaacttgcctatttagtgcaagctttcctggatgatgcgaaagaaagtggtttaacattagaagcaaccccggcgccagtcaaaattccgaaaagtgcggtggcgacagtgactaactataaagaaacggtcaccttgatcttggaacgttttggctgccagctatttaaaacgtctgcgccgaagaaagccagaccagccaaagcacgccacaaatggacaaaagaagttagtcaaattcctttttatattgatactcgacaaagcaaagcaacggttttttggcaaaaacgcaatgaaatgcttattaaagctggcgcgacaatgatgccagaagcccctttaaacaaagacgggtctgtcggtttttctgccagatttggtgaaaaacttcgtgatgaacgcaaggaacaatttaaagattttgtcacaacggaagatatcgtcttaaaaagcgtcaatgaagtcggcttgtttctctattttgctgggacaaacagctggttagagctggttgatgaaaacggcaaaaccttaaatgaatggactgtggtggaataa

SEQ ID NO: 682 - protein, 263 aa, Enterococcus faecalis
MDLHLTVDLKKTKTLIELADQAHLIIEQTTKLPQKEAAILFLLRDNQLVALGLAEEKATYKEVSFDHSILLKPTWDTELAYLVQAFLDDAKESGLTLEATPAPVKIPKSAVATVTNYKETVTLILERFGCQLFKTSAPKKARPAKARHKWTKEVSQIPFYIDTRQSKATVFWQKRNEMLIKAGATMMPEAPLNKDGSVGFSARFGEKLRDERKEQFKDFVTTEDIVLKSVNEVGLFLYFAGTNSWLELVDENGKTLNEWTVVE

SEQ ID NO: 683 - DNA, 792 bp, Enterococcus faecalis
atggacttacatttaaccgttgatctaaaaaaaacaaagacactcattgacttagccgatcaggcccacttaatcattgaacaaacaactaaattaccgaaaaaagaggcagcgattcttttcttgctaagagataaccaactagttgctttaggacttgctgaagaaaaagctacatataaagaagtttcttttgatcactcgattttattgaaaccgacttgggacacagaacttgcctatttagcgcaagctttcctagatgatgcgaaagaaagtggtttaacattggaagcaaccccagcgacagtcaaaattccgaaaagtgcggtagcgacagtgactaactataaagaaacagtcacctttatcttggaacgttttggctactctctgtttaaaaaaccggcgccgaagaaagccagaccagccaaagcacgccacaaatggacaaaagaagtcagccaaattcctttttatattgatactcgacaaagcaaagcaactgttttttggcaaaagcgcaatgaaatgcttattaaagctggcgcgacaatgatgccagaagcccctttaaataaagacgggtctgtcggtttctccgctagatttggtgaaaaacttcgtgatgaacgcaagggccaatttaaagactttgtcacaacggaagatatcgtcttaaaaagcgttaatgaagtcggcttgtttctctattttgctggaacaaacagctggttagagctagttgatgagaacggcaaaactttaaatgaatggactgtggtggaataa

SEQ ID NO: 684 - protein, 263 aa, Enterococcus faecalis; identical to SEQ ID NO: 606

SEQ ID NO: 685 - DNA, 792 bp, Enterococcus faecalis; identical to SEQ ID NO: 631

SEQ ID NO: 686 - protein, 263 aa, Enterococcus faecalis; identical to SEQ ID NO: 632

SEQ ID NO: 687 - DNA, 792 bp, Enterococcus faecalis; identical to SEQ ID NO: 59

SEQ ID NO: 688 - protein, 263 aa, Enterococcus faecalis; identical to SEQ ID NO: 35

SEQ ID NO: 689 - DNA, 792 bp, Enterococcus faecalis
atggacttacatttaaccgttgatctaaaaaaaacaaagacactcattgatttagccgatcaggcccacttaatcattgaacaaacaactaaattaccgaaaaaagaggcagcgattcttttcttgctaagagataaccaactagttgctttaggacttgctgaagaaaaagctacatataaagaagtttcttttgatcactcgattttattgaaaccgacttgggacacagaacttgcctatttagcgcaagctttcctagatgatgcgaaagaaagtggtttaacattggaagcaaccccaacgacagtcaaaattccgaaaagtgcggtagcgacagtgactaactataaagaaacagtcacctttatcttggaacgttttggctattctctgtttaaaaaaccggcgccgaaaaaagccagaccagccaaagcacgccacaaatggacaaaagaagttagccaaattcctttttatattgatactcgacaaagcaaagcaactgttttttggcaaaagcgcaatgaaatgcttattaaagctggcgcgacaatgatgccagaagcccctttaaataaagacgggtctgtcggtttctccgctagatttggtgaaaaacttcgtgatgaacgcaagggccaatttaaagactttgtcacaacggaagatatcatcttaaaaagcgttaatgaagtcggcttgtttctctattttgctggaacaaacagctggttagagctagttgatgagaacggcaaaaccttaaatgaatggactgtggtggaataa

SEQ ID NO: 690 - protein, 263 aa, Enterococcus faecalis
MDLHLTVDLKKTKTLIDLADQAHLIIEQTTKLPKKEAAILFLLRDNQLVALGLAEEKATYKEVSFDHSILLKPTWDTELAYLAQAFLDDAKESGLTLEATPTTVKIPKSAVATVTNYKETVTFILERFGYSLFKKPAPKKARPAKARHKWTKEVSQIPFYIDTRQSKATVFWQKRNEMLIKAGATMMPEAPLNKDGSVGFSARFGEKLRDERKGQFKDFVTTEDIILKSVNEVGLFLYFAGTNSWLELVDENGKTLNEWTVVE

SEQ ID NO: 691 - DNA, 975 bp, Enterococcus faecalis
atgagcaagaatttttgggcaacattgccaaagcccttttttgttttagcaccgatggaagatgtcactgatgtggtctttcgtcatgtcgtgaaagaagctggggcaccagatgtgttttttacagagtttactaattcagatagttattgtcatcctgaagggaaagacagtgtgcgcgggcgcctcgtttttacagaagatgaacagccgatggtggcacatatatggggggataaaccggaatttttccgtgaaatgagtatcggcgtagcggagatgggctttcaaggattagatataaatatgggctgtcctgtgcccaacgtggctgagcgtggaaaaggcagcgggctgattttgcgcccagaagtcgcggctgaattgattgacgccgccaaagcaggtggcttacctgttagtgtcaaaacacgcattgggtttactgaaatggcggaaatggaggcgtggatcacgcatttattagagcaagacattgcgaatctatccattcatttgcgaacacgaaaagagatgagtaaagtggatgcccattgggaggtcattccgcaaattatggctattcgggaccgtgtcgcaccgcaaacgacaattacgattaatggggatattcccgatcgtcaaaagggcctagaattagcagaacaatatggtgtagatggcatcatgattggccgggggatttttaaaaatccttatgcctttgaaaaagaacccaaaacacatacgccacaagaattgctgggcttgctacgtttacaattggatttgcaagacaaatatgcagaattggtgcctcgttccatcgttgggttgcatcgcttctttaaaatttatgtcaaaggctttccaggtgccagtgatttaagagcacaattaatgaatacaaaatcaacggatgaagtgcgccagttgttagcgacgtttgaagcagaacatggtgtgcttgactaa

SEQ ID NO: 692 - protein, 324 aa, Enterococcus faecalis
MSKNFWATLPKPFFVLAPMEDVTDVVFRHVVKEAGAPDVFFTEFTNSDSYCHPEGKDSVRGRLVFTEDEQPMVAHIWGDKPEFFREMSIGVAEMGFQGLDINMGCPVPNVAERGKGSGLILRPEVAAELIDAAKAGGLPVSVKTRIGFTEMAEMEAWITHLLEQDIANLSIHLRTRKEMSKVDAHWEVIPQIMAIRDRVAPQTTITINGDIPDRQKGLELAEQYGVDGIMIGRGIFKNPYAFEKEPKTHTPQELLGLLRLQLDLQDKYAELVPRSIVGLHRFFKIYVKGFPGASDLRAQLMNTKSTDEVRQLLATFEAEHGVLD

SEQ ID NO: 693 - DNA, 975 bp, Enterococcus faecalis; identical to SEQ ID NO: 61

SEQ ID NO: 694 - protein, 324 aa, Enterococcus faecalis; identical to SEQ ID NO: 42

SEQ ID NO: 695 - DNA, 975 bp, Enterococcus faecalis
atgagcaagaatttttgggcaacattgccaaagcccttttttgttttagcaccaatggaagacgtcactgatgtggtctttcgtcatgtcgtgaaagaagctggggcaccagatgtgttttttacagagtttactaattcagatagttattgtcatcctgaaggaaaagacagtgtgcgcgggcgcctcgtttttacagaagatgaacagccgatggtggcacatatttggggggataaaccggaatttttccgtgaaatgagtatcggcgtagcggagatgggctttcaaggattagatataaatatgggctgtcctgtgcccaacgtggctgagcgtggaaaaggcagcgggttaattttgcgcccagaagtcgcggctgaattgattgacgccgccaaagcaggtggcttacctgttagtgtcaaaacacgcattgggtttactgaaatggcggaaatggaggcatggatcacgcatttattagagcaagacattgcgaatctatccattcatttgcgaacacgaaaagagatgagcaaagtggatgctcattgggaggtcattccgcaaattatgtctattcgggaccgtgtcgcaccgcaaacgacaattacgattaatggggatattcccgatcgtcaaaagggcctagaattagcagaacaatatggtgtagatggcatcatgattggccgggggatttttaaaaatccttatgcctttgaaaaagaacccaaaacacatacgccacaagaattgctgggcttgctacgtttacaattggatttgcaagacaaatatgcagaattggtgcctcgttccatcgttgggctgcatcgcttctttaaaatttatgtcaaaggctttccaggtgccagcgatttaagagcacaattaatgaatacaaaatcaacggatgaagtgcgccagttgttagcgacgtttgaagcagaacatggtgtgcttgactaa

SEQ ID NO: 696 - protein, 324 aa, Enterococcus faecalis
MSKNFWATLPKPFFVLAPMEDVTDVVFRHVVKEAGAPDVFFTEFTNSDSYCHPEGKDSVRGRLVFTEDEQPMVAHIWGDKPEFFREMSIGVAEMGFQGLDINMGCPVPNVAERGKGSGLILRPEVAAELIDAAKAGGLPVSVKTRIGFTEMAEMEAWITHLLEQDIANLSIHLRTRKEMSKVDAHWEVIPQIMSIRDRVAPQTTITINGDIPDRQKGLELAEQYGVDGIMIGRGIFKNPYAFEKEPKTHTPQELLGLLRLQLDLQDKYAELVPRSIVGLHRFFKIYVKGFPGASDLRAQLMNTKSTDEVRQLLATFEAEHGVLD

SEQ ID NO: 697 - DNA, 975 bp, Enterococcus faecalis
atgagcaagaatttttgggcaacattgccaaagcccttttttgttttagcaccaatggaagacgtcactgatgtggtctttcgtcatgtcgtgaaagaagctggggcaccagatgtgttttttacagagtttactaattcagatagttattgtcatcctgaaggaaaagacagtgtgcgcgggcgcctcgtttttacagaagatgaacagccgatggtggcacatatttggggggataaaccggaatttttccgtgaaatgagtatcggcgtagcggagatgggctttcaagggttagacataaatatgggctgtcctgtgcctaacgtggctgagcgtggaaaaggcagcgggctaattttgcgcccagaagtcgcggctgaattgattgacgccgccaaagcaggtggcttacctgttagtgtcaaaacacgcattgggtttactgaaatggcggaaatggaggcgtggatcacgcatttattagagcaagacattgcgaatctatccattcatttgcgaacacgaaaagagatgagcaaagtggatgcccattgggaggtcattccgcaaattatggctattcgggaccgtgtcgcaccgcaaacgacaattacgattaatggggatattcccgatcgtcaaaagggcctagaattagcagaacaatatggtgtagatggcatcatgattggtcgggggatttttaaaaatccttatgcctttgaaaaagaacccaaaacgcatacgccacaagaattgatgggcttgctacgtttacaattggatttgcaagacaagtatgcagaattggtgcctcgctccatcgttgggctgcatcgcttcttcaaaatttatgtcaaaggctttccaggtgccagtgatttaagagcacaattaatgaatacaaaatcaacggatgaagtgcgccagttgttagcgacgtttgaagcagaacatggtgtgcttgactaa

SEQ ID NO: 698 - protein, 324 aa, Enterococcus faecalis
MSKNFWATLPKPFFVLAPMEDVTDVVFRHVVKEAGAPDVFFTEFTNSDSYCHPEGKDSVRGRLVFTEDEQPMVAHIWGDKPEFFREMSIGVAEMGFQGLDINMGCPVPNVAERGKGSGLILRPEVAAELIDAAKAGGLPVSVKTRIGFTEMAEMEAWITHLLEQDIANLSIHLRTRKEMSKVDAHWEVIPQIMAIRDRVAPQTTITINGDIPDRQKGLELAEQYGVDGIMIGRGIFKNPYAFEKEPKTHTPQELMGLLRLQLDLQDKYAELVPRSIVGLHRFFKIYVKGFPGASDLRAQLMNTKSTDEVRQLLATFEAEHGVLD

SEQ ID NO: 699 - DNA, 975 bp, Enterococcus faecalis
atgagcaagaatttttgggcaacattgccaaagcccttttttgttttagcaccgatggaagacgtcactgatgtggtctttcgtcatgtcgtgaaagaagctggggcaccagatgtgttttttacagagtttactaattcagatagttattgtcatcctgaaggaaaagatagtgtacgcgggcgcctcgtttttacagaagatgaacagccgatggtggcacatatttggggggataaaccggaatttttccgtgaaatgagtatcggcgtagcggagatgggctttcaaggattagatataaatatgggctgtcctgtgcctaacgtggctgagcgtggaaaaggcagcgggctgattttgcgcccagaagtcgcggctgaattgattgacgccgccaaagcaggtggcttacctgttagtgtcaaaacacgcattgggtttactgaaatggcggaaatggaggcgtggatcacgcatttattagagcaagacattgcgaatctatccattcatttgcgaacacgaaaagagatgagtaaagtggatgcccattgggaggtcattccgcaaattatggctattcgggaccgtgtcgcaccgcaaacgacaattacgattaatggggatattcccgatcgtcaaaagggcctagaattagcagaacaatatggtgtagatggcatcatgattggtcgggggatttttaaaaatccttatgcctttgaaaaagaacccaaaacacatacgccacaagaattgctgggcttgctacgtttacaattggatttgcaagacaaatatgcagaattggtgcctcgttccatcgttgggctgcatcgcttctttaaaatttatgtcaaaggctttccaggtgccagtgatttaagagcacaattaatgaatacaaaatcaacggatgaagtgcgccagttgttagcgacgtttgaagcagaacatggtgtgcttgactaa

SEQ ID NO: 700 - protein, 324 aa, Enterococcus faecalis; identical to SEQ ID NO: 692

SEQ ID NO: 701 - DNA, 975 bp, Enterococcus faecalis
atgagcaagaatttttgggcaacattgccaaagcccttttttgttttagcaccgatggaagatgtcactgatgtggtctttcgtcatgtcgtgaaagaagctggggcaccagatgtgttttttacagaatttactaattcggatagttattgtcatcctgaaggaaaagatagtgtacgcgggcgcctcgtttttacagaagatgaacagccgatggtggcacatatttggggggataaaccggaatttttccgtgaaatgagtatcggtgtagcggagatgggctttcaaggattagacataaatatgggctgtcctgtgcccaacgtggctgagcgtggaaaaggcagcgggttaattttgcgcccagaagtcgcggctgaattgattgacgccgccaaagcaggtggcttacctgttagtgtcaaaacacgcattgggtttactgaaatggcggaaatggaggcgtggatcacgcatttattagagcaagacattgcgaatctatccattcatttgcgaacacgaaaagagatgagcaaagtggatgcccattgggaggtcattccgcaaattatggctattcgggaccgtgtcgcaccgcaaacgacaattacgattaatggggatattcccgatcgtcaaaagggcctagaattagcagaacaatatggtgtagatggcatcatgattggtcgggggatttttaaaaatccttatgcctttgaaaaagaacccaaaacgcatacgccacaagaattgatgggcttgctacgtttacaattggatttgcaagacaagtatgcagaattggtgcctcgctccatcgttgggctgcatcgcttcttcaaaatttatgtcaaaggctttccaggtgccagtgatttaagagcacaattaatgaatacaaaatcaacggatgaagtgcgccagttgttagcgacgtttgaagcagaacatggtgtgcttgactaa

SEQ ID NO: 702 - protein, 324 aa, Enterococcus faecalis; identical to SEQ ID NO: 698

SEQ ID NO: 703 - DNA, 975 bp, Enterococcus faecalis; identical to SEQ ID NO: 695

SEQ ID NO: 704 - protein, 324 aa, Enterococcus faecalis; identical to SEQ ID NO: 696

SEQ ID NO: 705 - DNA, 975 bp, Enterococcus faecalis
atgagcaagaatttttgggcaacattgccaaagcccttttttgttttagcaccaatggaagatgtcactgatgtggtctttcgtcatgttgtgaaagaagctggggcgccagatgtgttttttacagagtttactaattcagatagttattgtcatcctgaagggaaagacagtgtgcgcgggcgcctcgtttttacagaagatgaacagccgatggtggcacatatatggggggataaaccggaatttttccgtgaaatgagtatcggcgtagcggagatgggctttcaaggattagatataaatatgggctgtcctgtgcccaacgtggctgagcgtggaaaaggcagcgggctgattttgcgcccagaagtcgcggctgaattgattgacgccgccaaagcaggtggcttacctgttagtgtcaaaacacgcattgggtttactgaaatggcggaaatggaggcgtggatcacgcatttattagagcaagacattgcgaatctatccattcatttgcgaacacgaaaagagatgagtaaagtggatgcccattgggaggtcattccgcaaattatggctattcgggaccgtgtcgcaccgcaaacgacaattacgattaatggggatattcccgatcgtcaaaagggcctagaattagcagaacaatatggtgtagatggcatcatgattggccgggggatttttaaaaatccttatgcctttgaaaaagaacccaaaacacatacgccacaagaattgctgggcttgctacgtttacaattggatttgcaagacaaatatgcggaattggtgcctcgctccattgttgggttgcatcgcttcttcaaaatttatgtcaaaggctttccaggtgccagtgatttaagagcacaattaatgaatacaaaatcaacggatgaagtgcgccagttgttagcgacgtttgaagcagaacatggtgtgcttgactaa

SEQ ID NO: 706 - protein, 324 aa, Enterococcus faecalis; identical to SEQ ID NO: 692

SEQ ID NO: 707 - DNA, 975 bp, Enterococcus faecalis
atgagcaagaatttttgggcaacattgccaaagcccttttttgttttagcaccgatggaagacgtcactgatgtggtctttcgtcatgtcgtgaaagaagctggggcaccagatgtgttttttacagagtttactaattcagatagttattgtcatcctgaaggaaaagatagtgtacgcgggcgcctcgtttttacagaagatgaacagccgatggtggcacatatttggggggataaaccggaatttttccgtgaaatgagtatcggcgtagcggagatgggctttcaaggattagatataaatatgggctgtcctgtgcccaacgtggctgagcgtggaaaaggcagcgggctgattttgcgcccagaagtcgcggctgaattgattgacgccgccaaagcaggtggcttacctgttagtgtcaaaacacgcattgggtttactgaaatggcggaaatggaggcgtggatcacgcatttattagagcaagacattgcgaatctatccattcatttgcgaacacgaaaagagatgagcaaagtggatgctcattgggaggtcattccgcaaattatgtctattcgggaccgtgtcgcaccgcaaacgacaattacgattaatggggatattcccgatcgtcaaaagggcctagaattagcagaacaatatggtgtagatggcatcatgattggtcgggggatttttaaaaatccttatgcctttgaaaaagaacccaaaacacatacgccacaagaattgctgggcttgctacgtttacaattggatttgcaagacaaatatgcagaattggtgcctcgttccatcgttgggctgcatcgcttctttaaaatttatgtcaaaggctttccaggtgccagtgatttaagagcacaattaatgaatacaaaatcaacggatgaagtgcgccagttgttagcgacgtttgaagcagaacatggtgtgcttgactaa

SEQ ID NO: 708 - protein, 324 aa, Enterococcus faecalis; identical to SEQ ID NO: 696

SEQ ID NO: 709 - DNA, 975 bp, Enterococcus faecalis; identical to SEQ ID NO: 61

SEQ ID NO: 710 - protein, 324 aa, Enterococcus faecalis; identical to SEQ ID NO: 42

SEQ ID NO: 711 - DNA, 975 bp, Enterococcus faecalis; identical to SEQ ID NO: 61

SEQ ID NO: 712 - protein, 324 aa, Enterococcus faecalis; identical to SEQ ID NO: 42

SEQ ID NO: 713 - DNA, 930 bp, Enterococcus faecalis
atgaaagtgaataaatttgttaaaggttttgcggcaattgcattatttagtttagtattagcaggctgtggcgcagacaagaaagacaacacaacgaactcttctagcgcagcatcttcagaaacgaaaaaatcaactgaatcatcagcaccagcgaaaaaagttgccggtggcgatttaaaagatggtacgtataaattagaagaaaaaaatgaaaaaaatggttaccgtgcagtctttgaaatgactgtaaaagacggcaaaatcactgaatctaaatatgacaacatcaatgctgacggtaaatctaaaacagaagacactaagtatgaagaaagcatgaaagcaaaatctggtgttggaccaaaagaatacatcaaacaattaaacgattcttttgttaaagcacaaagcgcaagcggtgtggaagtagtaactggtgcgactcattcatctgaatcattccaaaactacgcacaacaattaatccaagcagcacaagctggtaacacagacacaatcgaaatcgacaatggggcaacattgaaagatggtacgtactcattgaaagaaaaaaatgactcaaacggctaccacacaacattctcaatgactgtgaaagatggtaaagtgactgaatctaactacgataacgtgaacgctgacggcaaatctaaaaaagatgacactgaatacgaaagcaaaatgaaagacgttgctggcgttggaccaaaagaatatatcgaaacattaaacaaagaatttgttaaagcaatgggcgaagaagacggctcacctgcaggtgttgaagtggtaactggtgcaacacacagcacacattcattcatcaactacgcacaacaattagtgaacgctgctgaaaaaggcgacacaactgaaatcgttgttgacaacatcgtaccaaaataa

SEQ ID NO: 714 - protein, 309 aa, Enterococcus faecalis
MKVNKFVKGFAAIALFSLVLAGCGADKKDNTTNSSSAASSETKKSTESSAPAKKVAGGDLKDGTYKLEEKNEKNGYRAVFEMTVKDGKITESKYDNINADGKSKTEDTKYEESMKAKSGVGPKEYIKQLNDSFVKAQSASGVEVVTGATHSSESFQNYAQQLIQAAQAGNTDTIEIDNGATLKDGTYSLKEKNDSNGYHTTFSMTVKDGKVTESNYDNVNADGKSKKDDTEYESKMKDVAGVGPKEYIETLNKEFVKAMGEEDGSPAGVEVVTGATHSTHSFINYAQQLVNAAEKGDTTEIVVDNIVPK

SEQ ID NO: 715 - DNA, 930 bp, Enterococcus faecalis
atgaaagtgaataaatttgttaaaggttttgcggcaattgcattatttagtttagtattagcaggctgtggcgcagacaagaaagacaacacaacgaactcttctagcgcagcatcttcagaaacgaaaaaatcaactgaatcatcagcaccagcgaaaaaagttgccggtggcgatttaaaagatggtacgtataaattagaagaaaaaaatgaaaaaaatggttaccgtgcagtctttgaaatgactgtaaaagacggcaaaatcactgaatctaaatatgacaacatcaatgctgacggcaaatctaaaacagaagacactaagtatgaagaaagcatgaaagcaaaatctggtgttggaccaaaagaatacatcaaacaattaaacgattcttttgttaaagcacaaagcgcaagcggtgtggaagtagtaactggtgcgactcattcatctgaatcattccaaaactacgcacaacaattaatccaagcagcacaagctggtaacacagacacaatcgaaatcgacaatggggcaacattgaaagatggtacgtactcattgaaagaaaaaaatgactcaaacggctaccacacaacattctcaatgactgtgaaagatggtaaagtgactgaatctaactacgataacgtgaacgctgacggcaaatctaaaaaagatgacactgaatacgaaagcaaaatgaaagacgttgctggcgttggaccaaaagaatatatcgaaacattaaacaaagaatttgttaaagcaatgggcgaagaagacggctcacctgcaggtgttgaagtggtaactggtgcaacacacagcacacattcattcatcaactacgcacaacaattagtgaacgctgctgaaaaaggcgacacaactgaaatcgttgttgacaacatcgtaacaaaataa

SEQ ID NO: 716 - protein, 309 aa, Enterococcus faecalis
MKVNKFVKGFAAIALFSLVLAGCGADKKDNTTNSSSAASSETKKSTESSAPAKKVAGGDLKDGTYKLEEKNEKNGYRAVFEMTVKDGKITESKYDNINADGKSKTEDTKYEESMKAKSGVGPKEYIKQLNDSFVKAQSASGVEVVTGATHSSESFQNYAQQLIQAAQAGNTDTIEIDNGATLKDGTYSLKEKNDSNGYHTTFSMTVKDGKVTESNYDNVNADGKSKKDDTEYESKMKDVAGVGPKEYIETLNKEFVKAMGEEDGSPAGVEVVTGATHSTHSFINYAQQLVNAAEKGDTTEIVVDNIVTK

SEQ ID NO: 717 - DNA, 930 bp, Enterococcus faecalis; identical to SEQ ID NO: 715

SEQ ID NO: 718 - protein, 309 aa, Enterococcus faecalis; identical to SEQ ID NO: 716

SEQ ID NO: 719 - DNA, 930 bp, Enterococcus faecalis
atgaaagtgaataaatttgttaaaggttttgcggcaattgcattatcaagtttagtcttagcagcatgtggtgcagacaagaaagacaacacaacgaactcttctagcgcagcatcttcagaaacgaaaaaatcaactgaatcatcagcaccagcgaaaaaagttgccggtggcgatttaaaagatggtacgtataaattagaagaaaaaaatgaaaaaaatggttaccgtgcagtctttgaaatgactgtaaaagacggcaaaatcactgaatctaaatatgacaacatcaatgctgacggcaaatctaaaacagaagacactaagtatgaagaaagcatgaaagcaaaatctggtgttggaccaaaagaatacatcaaacaattaaacgattcttttgttaaagcacaaagcgcaagcggtgtggaagtagtaactggtgcgactcattcatctgaatcattccaaaactacgcacaacaattaatccaagcagcacaagctggtaacacagacacaatcgaaatcgacaatggcgcagcattgaaagatggtacgtactcattgaaagaaaaaaatgactcaaacggctaccacacaacattctcaatgactgtgaaagatggtaaagtgactgaatctaactacgataacgtgaacgctgacggcaaatctaaaaaagatgacactgaatacgaaagcaaaatgaaagacgttgctggcgttggaccaaaagaatatatcgaaacattaaacaaagaatttgttaaagcaatgggcgaagaagacggctcacctgcaggtgttgaagtggtaactggtgcaacacacagcacacattcattcatcaactacgcacaacaattagtgaacgctgctgaaaaaggcgacacaactgaaatcgttgttgacaacatcgtaacaaaataa

SEQ ID NO: 720 - protein, 309 aa, Enterococcus faecalis
MKVNKFVKGFAAIALSSLVLAACGADKKDNTTNSSSAASSETKKSTESSAPAKKVAGGDLKDGTYKLEEKNEKNGYRAVFEMTVKDGKITESKYDNINADGKSKTEDTKYEESMKAKSGVGPKEYIKQLNDSFVKAQSASGVEVVTGATHSSESFQNYAQQLIQAAQAGNTDTIEIDNGAALKDGTYSLKEKNDSNGYHTTFSMTVKDGKVTESNYDNVNADGKSKKDDTEYESKMKDVAGVGPKEYIETLNKEFVKAMGEEDGSPAGVEVVTGATHSTHSFINYAQQLVNAAEKGDTTEIVVDNIVTK

SEQ ID NO: 721 - DNA, 930 bp, Enterococcus faecalis; identical to SEQ ID NO: 715

SEQ ID NO: 722 - protein, 309 aa, Enterococcus faecalis; identical to SEQ ID NO: 716

SEQ ID NO: 723 - DNA, 930 bp, Enterococcus faecalis
atgaaagtgaataaatttgttaaaggttttgcggcaattgcattatttagtttagtattagcaggctgtggcgcagacaagaaagacaacacaacgaactcttctagcgcagcatcttcagaaacgaaaaaatcaactgaatcatcagcaccagcgaaaaaagttgccggtggcgatttaaaagatggtacgtataaattagaagaaaaaaatgaaaaaaatggttaccgtgcagtctttgaaatgactgtaaaagacggcaaaatcactgaatctaaatatgacaacatcaatgctgacggcaaatctaaaacagaagacactaagtatgaagaaagcatgaaagcaaaatctggtgttggaccaaaagaatacatcaaacaattaaacgattcttttgttaaagcacaaagcgcaagcggtgtggaagtagtaactggtgcgactcattcatctgaatcattccaaaactacgcacaacaattaatccaagcagcacaagctggtaacacagacacaatcgaaatcgacaatggcgcagcattgaaagatggtacgtactcattgaaagaaaaaaatgactcaaacggctaccacacaacattctcaatgactgtgaaagatggtaaagtgactgaatctaactacgataacgtgaacgctgacggcaaatctaaaaaagatgacactgaatacgaaagcaaaatgaaagacgttgctggcgttggaccaaaagaatatatcgaaacattaaacaaagaatttgttaaagcaatgggcgaagaagacggctcacctgcaggtgttgaagtggtaactggtgcaacacacagcacacattcattcatcaactacgcacaacaattagtgaacgctgctgaaaaaggcgacacaactgaaatcgttgttgacaacatcgtaacaaaataa

SEQ ID NO: 724 - protein, 309 aa, Enterococcus faecalis
MKVNKFVKGFAAIALFSLVLAGCGADKKDNTTNSSSAASSETKKSTESSAPAKKVAGGDLKDGTYKLEEKNEKNGYRAVFEMTVKDGKITESKYDNINADGKSKTEDTKYEESMKAKSGVGPKEYIKQLNDSFVKAQSASGVEVVTGATHSSESFQNYAQQLIQAAQAGNTDTIEIDNGAALKDGTYSLKEKNDSNGYHTTFSMTVKDGKVTESNYDNVNADGKSKKDDTEYESKMKDVAGVGPKEYIETLNKEFVKAMGEEDGSPAGVEVVTGATHSTHSFINYAQQLVNAAEKGDTTEIVVDNIVTK

SEQ ID NO: 725 - DNA, 930 bp, Enterococcus faecalis
atgaaagtgaataaatttgttaaaggttttgcggcaattgcattatttagtttagtattagcaggctgtggcgcagacaagaaagacaacacaacgaactcttctagcgtagcatcttcagaaacgaaaaaatcaactgaatcatcagcaccagcgaaaaaagttgccggtggcgatttaaaagatggtacgtataaattagaagaaaaaaatgaaaaaaatggttaccgtgcagtctttgaaatgactgtaaaagacggcaaaatcactgaatctaaatatgacaacatcaatgctgacggcaaatctaaaacagaagacactaagtatgaagaaagcatgaaagcaaaatctggtgttggaccaaaagaatacatcaaacaattaaacgattcttttgttaaagcacaaagcgcaagcggtgtggaagtagtaactggtgcgactcattcatctgaatcattccaaaactacgcacaacaattaatccaagcagcacaagctggtaacacagacacaatcgaaatcgacaatggggcaacattgaaagatggtacgtactcattgaaagaaaaaaatgactcaaacggctaccacacaacattctcaatgactgtgaaagatggtaaagtgactgaatctaactacgataacgtgaacgctgacggcaaatctaaaaaagatgacactgaatacgaaagcaaaatgaaagacgttactggcgttggaccaaaagaatatatcgaaacattaaacaaagaatttgttaaagcaatgggcgaagaagacggctcacctgcaggtgttgaagtggtaactggtgcaacacacagcacacattcattcatcaactacgcacaacaattagtgaacgctgctgaaaaaggcgacacaactgaaatcgttgttgacaacatcgtaacaaaataa

SEQ ID NO: 726 - protein, 309 aa, Enterococcus faecalis
MKVNKFVKGFAAIALFSLVLAGCGADKKDNTTNSSSVASSETKKSTESSAPAKKVAGGDLKDGTYKLEEKNEKNGYRAVFEMTVKDGKITESKYDNINADGKSKTEDTKYEESMKAKSGVGPKEYIKQLNDSFVKAQSASGVEVVTGATHSSESFQNYAQQLIQAAQAGNTDTIEIDNGATLKDGTYSLKEKNDSNGYHTTFSMTVKDGKVTESNYDNVNADGKSKKDDTEYESKMKDVTGVGPKEYIETLNKEFVKAMGEEDGSPAGVEVVTGATHSTHSFINYAQQLVNAAEKGDTTEIVVDNIVTK

SEQ ID NO: 727 - DNA, 930 bp, Enterococcus faecalis; identical to SEQ ID NO: 715

SEQ ID NO: 728 - protein, 309 aa, Enterococcus faecalis; identical to SEQ ID NO: 716

SEQ ID NO: 729 - DNA, 930 bp, Enterococcus faecalis
atgaaagtgaataaatttgttaaaggttttgcggcaattgcattatttagtttagtattagcaggctgtggcgcagacaagaaagacaacacaacgaactcttctagcgcagcatcttcagaaacgaaaaaatcaactgaatcatcagcaccagcgaaaaaagttgccggtggcgatttaaaagatggtacgtataaattagaagaaaaaaatgaaaaaaatggttaccgtgcagtctttgaaatgactgtaaaagacggcaaaatcactgaatctaaatatgacaacatcaatgctgacggcaaatctaaaacagaagacactaagtatgaagaaagcatgaaagcaaaatctggtgttggaccaaaagaatacatcaaacaattaaacgattcttttgttaaagcacaaagcgcaagcggtgtggaagtagtaactggtgcgactcattcatctgaatcattccaaaactacgcacaacaattaatccaagcagcacaagctggtaacacagacacaatcgaaatcgacaatggggcaacattgaaagatggtacgtactcattgaaagaaaaaaatgactcaaacggctaccacacaacattctcaatgactgtaaaagatggtaaagtgactgaatctaactacgataacgtgaacgctgacggcaaatctaaaaaagatgacactgaatacgaaagcaaaatgaaagacgttgctggcgttggaccaaaagaatatatcgaaacattaaacaaagaatttgttaaagcaatgggcgaagaagacggctcacctgcaggtgttgaagtggtaactggtgcaacacacagcacacattcattcatcaactacgcacaacaattagtgaacgctgctgaaaaaggcgacacaactgaaatcgttgttgacaacatcgtaacaaaataa

SEQ ID NO: 730 - protein, 309 aa, Enterococcus faecalis; identical to SEQ ID NO: 716

SEQ ID NO: 731 - DNA, 930 bp, Enterococcus faecalis; identical to SEQ ID NO: 715

SEQ ID NO: 732 - protein, 309 aa, Enterococcus faecalis; identical to SEQ ID NO: 716

SEQ ID NO: 733 - DNA, 930 bp, Enterococcus faecalis
atgaaagtgaataaatttgttaaaggttttgcggcaattgcattatttagtttagtattagcaggctgtggcgcagacaagaaagacaacacaacgaactcttctagcgcagcatcttcagaaacgaaaaaatcaactgaatcatcagcaccagcgaaaaaagttgccggtggcgatttaaaagatggtacgtataaattagaagaaaaaaatgaaaaaaatggttaccgtgcagtctttgaaatgactgtaaaagacggaaaaatcactgaatctaaatatgacaacatcaatgctgacggcaaatctaaaacagaagacactaagtatgaagaaagcatgaaagcaaaatctggcgttggaccaaaagaatacatcaaacaattaaacgattcttttgttaaagcacaaagcgcaagcggtgtggaagtagtaactggtgcgactcattcatctgaatcattccaaaactacgctcaacaattaatccaagcagcacaagctggtaacacagacacaatcgaaatcgacaatggggcaacattgaaagatggtacgtactcattgaaagaaaaaaatgactcaaacggctaccacacaacattctcaatgactgtaaaagatggtaaagtgactgaatctaactacgataacgtgaacgctgacggcaaatctaaaaaagatgacactgaatacgaaagcaaaatgaaagacgttgctggcgttggaccaaaagaatatatcgaaacattaaacaaagaatttgttaaagcaatgggcgaagaagacggctcacctgcaggtgttgaagtggtaactggtgcaacacacagcacacattcattcatcaactacgcacaacaattagtgaacgctgctgaaaaaggcgacacaactgaaatcgttgttgacaacatcgtaacaaaataa

SEQ ID NO: 734 - protein, 309 aa, Enterococcus faecalis; identical to SEQ ID NO: 716

SEQ ID NO: 735 - DNA, 930 bp, Enterococcus faecalis
atgaaagtgaataaatttgttaaaggttttgcggcaattgcattatttagtttagtattagcaggctgtggcgcagacaagaaagacaacacaacgaactcttctagcgcagcatcttcagaaacgaaaaaatcaactgaatcatcagcaccagcgaaaaaagttgccggtggcgatttaaaagatggtacgtataaattagaagaaaaaaatgaaaaaaatggttaccgtgcagtctttgaaatgactgtaaaagacggcaaaatcactgaatctaaatatgacaacatcaatgctgacggcaaatctaaaacagaagacactaagtatgaagaaagcatgaaagcaaaatctggtgttggaccaaaagaatacatcaaacaattaaacgattcttttgttaaagcacaaagcgcaagcggcgtggaagtagtaactggtgcgactcattcatctgaatcattccaaaactacgcacaacaattgatccaagcagcacaagctggtaacacagacacaatcgaaatcgacaatggggcaacattgaaagatggtacgtactcattgaaagaaaaaaatgactcaaacggctaccacacaacattctcaatgactgtgaaagacggtaaagtgactgaatctaactacgataacgtgaacgctgacggcaaatctaaaaaagatgacactgaatacgaaagcaaaatgaaagacgttactggcgttggaccaaaagaatatatcgaaacattaaacaaagaatttgttaaagcaatgggcgaagaagacggctcacctgcaggtgttgaagtggtaactggtgcaacacacagcacacattcattcatcaactacgcacaacaattagtgaacgctgctgaaaaaggcgacacaactgaaatcgttgttgacaacatcgtaacaaaataa

SEQ ID NO: 736 - protein, 309 aa, Enterococcus faecalis
MKVNKFVKGFAAIALFSLVLAGCGADKKDNTTNSSSAASSETKKSTESSAPAKKVAGGDLKDGTYKLEEKNEKNGYRAVFEMTVKDGKITESKYDNINADGKSKTEDTKYEESMKAKSGVGPKEYIKQLNDSFVKAQSASGVEVVTGATHSSESFQNYAQQLIQAAQAGNTDTIEIDNGATLKDGTYSLKEKNDSNGYHTTFSMTVKDGKVTESNYDNVNADGKSKKDDTEYESKMKDVTGVGPKEYIETLNKEFVKAMGEEDGSPAGVEVVTGATHSTHSFINYAQQLVNAAEKGDTTEIVVDNIVTK

SEQ ID NO: 737 - DNA, 930 bp, Enterococcus faecalis; identical to SEQ ID NO: 715

SEQ ID NO: 738 - protein, 309 aa, Enterococcus faecalis; identical to SEQ ID NO: 716

SEQ ID NO: 739 - DNA, 930 bp, Enterococcus faecalis; identical to SEQ ID NO: 723

SEQ ID NO: 740 - protein, 309 aa, Enterococcus faecalis; identical to SEQ ID NO: 724

SEQ ID NO: 741 - DNA, 930 bp, Enterococcus faecalis
atgaaagtgaataaatttgttaaaggttttgcggcaattgcattatttagtttagtattagcaggctgtggcgcagacaagaaagacaacacaacgaactcttctagcgcagcatcttcagaaacgaaaaaatcaactgaatcatcagcaccagcgaaaaaagttgccggtggcgatttaaaagatggtacgtataaattagaagaaaaaaatgaaaaaaatggttaccgtgcagtctttgaaatgactgtaaaagacggcaaaatcactgaatctaaatatgacaacatcaatgctgacaacaaatctaaaacagaagacactaagtatgaagaaagcatgaaagcaaaatctggtgttggaccaaaagaatacatcaaacaattaaacgattcttttgttaaagcacaaagcgcaagcggtgtggaagtagtaactggtgcgactcattcatctgaatcattccaaaactacgcacaacaattaatccaagcagcacaagctggtaacacagacacaatcgaaatcgacaatggggcaacattgaaagatggtacgtactcattgaaagaaaaaaatgactcaaacggctaccacacaacattctcaatgactgtgaaagatggtaaagtgactgaatctaactacgataacgtgaacgctgacggcaaatctaaaaaagatgacactgaatacgaaagcaaaatgaaagacgttgctggcgttggaccaaaagaatatatcgaaacattaaacaaagaatttgttaaagcaatgggcgaagaagacggctcacctgcaggtgttgaagtggtaactggtgcaacacacagcacacattcattcatcaactacgcacaacaattagtgaacgctgctgaaaaaggcgacacatctgaaatcgttgttgacaacatcgtaacaaaataa

SEQ ID NO: 742 - protein, 309 aa, Enterococcus faecalis
MKVNKFVKGFAAIALFSLVLAGCGADKKDNTTNSSSAASSETKKSTESSAPAKKVAGGDLKDGTYKLEEKNEKNGYRAVFEMTVKDGKITESKYDNINADNKSKTEDTKYEESMKAKSGVGPKEYIKQLNDSFVKAQSASGVEVVTGATHSSESFQNYAQQLIQAAQAGNTDTIEIDNGATLKDGTYSLKEKNDSNGYHTTFSMTVKDGKVTESNYDNVNADGKSKKDDTEYESKMKDVAGVGPKEYIETLNKEFVKAMGEEDGSPAGVEVVTGATHSTHSFINYAQQLVNAAEKGDTSEIVVDNIVTK

SEQ ID NO: 743 - DNA, 930 bp, Enterococcus faecalis
atgaaagtgaataaatttgttaaaggttttgcggcaattgcattatttagtttagtattagcaggctgtggcgcagacaagaaagacaacacaacgaactcttctagcgcagcatcttcagaaacgaaaaaatcaactgaatcatcagcaccagcgaaaaaagttgccggtggcgatttaaaagatggtacgtataaattagaagaaaaaaatgaaaaaaatggttaccgtgcagtctttgaaatgactgtaaaagacggcaaaatcactgaatctaaatatgacaacatcaatgctgacggcaaatctaaaacagaagacactaagtatgaagaaagcatgaaagcaaaatctggtgttggaccaaaagaatacatcaaacaattaaacgattcttttgttaaagcacaaagcgcaagcggtgtggaagtagtaactggtgcgactcattcatctgaatcattccaaaactacgcacaacaattaatccaagcagcacaagctggtaacacagacacaatcgaaatcgacaatggggcaacattgaaagatggtacgtactcattgaaagaaaaaaatgactcaaacggctaccacacaacattctcaatgactgtgaaagatggtaaagtgactgaatctaactacgataacgtgaacgctgacggcaaatctaaaaaagatgacactgaatacgaaagcaaaatgaaagacgttgctggcgttggaccaaaagaatatatcgaaacattaaacaaagaatttgttaaagcaatgggcgaagaagacggctcacctgcaggtgttgaagtggtaactggtgcaacacacagcacacattcattcatcaactacgcacaacaattagtgaacgctgctgaaaaaggagacacaactgaaatcgttgttgacaacatcgtaacaaaataa

SEQ ID NO: 744 - protein, 309 aa, Enterococcus faecalis; identical to SEQ ID NO: 716

SEQ ID NO: 745 - DNA, 930 bp, Enterococcus faecalis; identical to SEQ ID NO: 715

SEQ ID NO: 746 - protein, 309 aa, Enterococcus faecalis; identical to SEQ ID NO: 716

SEQ ID NO: 747 - DNA, 930 bp, Enterococcus faecalis
atgaaagtgaataaatttgttaaaggttttgcggcaattgcattatttagtttagtattagcaggctgtggcgcagacaagaaagacaacacaacgaactcttctagcgcagcatcttcagaaacgaaaaaatcaactgaatcatcagcaccagcgaaaaaagttgccggtggcgatttaaaagatggtacgtataaattagaagaaaaaaatgaaaaaaatggttaccgtgcagtctttgaaatgactgtaaaagacggcaaaatcactgaatctaaatatgacaacatcaatgctgacggcaaatctaaaacagaagacactaagtatgaagaaagcatgaaagcaaaatctggtgttggaccaaaagaatacatcaaacaattaaacgattcttttgttaaagcacaaagcgcaagcggtgtggaagtagtaactggtgcgactcattcatctgaatcattccaaaactacgcacaacaattaatccaagcagcacaagctggtaacacagacacaatcgaaatcgacaatggcgcaacattgaaagatggtacgtactcattgaaagaaaaaaatgactcaaacggctaccacacaacattctcaatgactgtgaaagatggtaaagtgactgaatctaactacgataacgtgaacgctgacggcaaatctaaaaaagatgacactgaatacgaaagcaaaatgaaagacgttgctggcgttggaccaaaagaatatatcgaaacattaaacaaagaatttgttaaagcaatgggcgaagaagacggctcacctgcaggtgttgaagtggtaactggtgcaacacacagcacacattcattcatcaactacgcacaacaattagtgaacgctgctgaaaaaggcgacacaactgaaatcgttgttgacaacatcgtaacaaaataa

SEQ ID NO: 748 - protein, 309 aa, Enterococcus faecalis; identical to SEQ ID NO: 716

SEQ ID NO: 749 - DNA, 930 bp, Enterococcus faecalis
atgaaagtgaataaatttgttaaaggttttgcggcaattgcattatcaagtttagtattagcagcatgtggtgcagacaagaaagacaacacaacgaactcttctagcgcagcatcttcagaaacgaaaaaatcaactgaatcatcagcaccagcgaaaaaagttgccggtggcgatttaaaagatggtacgtataaattagaagaaaaaaatgaaaaaaatggttaccgtgcagtctttgaaatgactgtaaaagacggcaaaatcactgaatctaaatatgacaacatcaatgctgacggcaaatctaaaacagaagacactaagtatgaagaaagcatgaaagcaaaatctggtgttggaccaaaagaatacatcaaacaattaaacgattcttttgttaaagcacaaagcgcaagcggtgtggaagtagtaactggtgcgactcattcatctgaatcattccaaaactacgcacaacaattaatccaagcagcacaagctggtaacacagacacaatcgaaatcgacaatggggcaacattgaaagatggtacgtactcattgaaagaaaaaaatgactcaaacggctaccacacaacattctcaatgactgtgaaagatggtaaagtgactgaatctaactacgataacgtgaacgctgacggcaaatctaaaaaagatgacactgaatacgaaagcaaaatgaaagacgttgctggcgttggaccaaaagaatatatcgaaacattaaacaaagaatttgttaaagcaatgggcgaagaagacggctcacctgcaggtgttgaagtggtaactggtgcaacacacagcacacattcattcatcaactacgcacaacaattagtgaacgctgctgaaaaaggcgacacaactgaaatcgttgttgacaacatcgtaacaaaataa

SEQ ID NO: 750 - protein, 309 aa, Enterococcus faecalis; identical to SEQ ID NO: 82

SEQ ID NO: 751 - DNA, 930 bp, Enterococcus faecalis
atgaaagtgaataaatttgttaaaggttttgcggcaattgcattatttagtttagtattagcaggctgtggcgcagacaagaaagacaacacaacgaactcttctagcgcagcatcttcagaaacgaaaaaatcaactgaatcatcagcaccagcgaaaaaagttgccggtggcgatttaaaagatggtacgtataaattagaagaaaaaaatgaaaaaaatggttaccgtgcagtctttgaaatgactgtaaaagacggcaaaatcactgaatctaaatatgacaacatcaatgctgacggcaaatctaaaacagaagacactaagtatgaagaaagcatgaaagcaaaatctggtgttggaccaaaagaatacatcaaacaattaaacgattcttttgttaaagcacaaagcgcaagcggtgtggaagtagtaactggtgcgactcattcatctgaatcattccaaaactacgcacaacaattaatccaagcagcacaagctggtaacacagacacaatcgaaatcgacaatggggcaacattgaaagatggtacgtactcattgaaagaaaaaaatgactcaaacggctaccacacaacattctcaatgactgtgaaagatggtaaagtgactgaatctaactacgataacgtgaacgctgacggcaaatctaaaaaagatgacactgaatacgaaagcaaaatgaaagacgttgctggcgttggaccaaaagaatatatcgaaacattaaacaaagaatttgttaaagcaatgggcgaagaagacggatcacctgcaggtgttgaagtagtaactggtgcaacacacagcacacattcattcatcaactacgcacaacaattagtgaacgctgctgaaaaaggcgacacaactgaaatcgttgttgacaacatcgtaacaaaataa

SEQ ID NO: 752 - protein, 309 aa, Enterococcus faecalis; identical to SEQ ID NO: 716

SEQ ID NO: 753 - DNA, 930 bp, Enterococcus faecalis; identical to SEQ ID NO: 715

SEQ ID NO: 754 - protein, 309 aa, Enterococcus faecalis; identical to SEQ ID NO: 716

SEQ ID NO: 755 - DNA, 930 bp, Enterococcus faecalis; identical to SEQ ID NO: 715

SEQ ID NO: 756 - protein, 309 aa, Enterococcus faecalis; identical to SEQ ID NO: 716

SEQ ID NO: 757 - DNA, 930 bp, Enterococcus faecalis; identical to SEQ ID NO: 715

SEQ ID NO: 758 - protein, 309 aa, Enterococcus faecalis; identical to SEQ ID NO: 716

SEQ ID NO: 759 - DNA, 930 bp, Enterococcus faecalis; identical to SEQ ID NO: 715

SEQ ID NO: 760 - protein, 309 aa, Enterococcus faecalis; identical to SEQ ID NO: 716

SEQ ID NO: 761 - DNA, 930 bp, Enterococcus faecalis
atgaaagtgaataaatttgttaaaggttttgcggcaattgcattatcaagtttagtattagcagcatgtggtgcagacaagaaagacaacacaacgaactcttctagcgcagcatcttcagaaacgaaaaaatcaacggaatcatcagcaccagcgaaaaaagttgccggtggcgatttaaaagatggtacgtataaattagaagaaaaaaatgaaaaaaatggttaccgtgcagtctttgaaatgactgtaaaagacggcaaaatcactgaatctaaatatgacaacatcaatgctgacggcaagtctaaaacagaagacactaagtatgaagaaagcatgaaagcaaaatctggtgttggaccaaaagaatacatcaaacaattaaacgattcttttgttaaagcacaaagcgcaagcggtgtggaagtagtaactggtgcgactcattcatctgaatcattccaaaactacgcacaacaattaatccaagcagcacaagctggtaacacagacacaatcgaaatcgacaatggggcaacattgaaagatggtacgtactcattgaaagaaaaaaatgactcaaacggctaccacacaacattctcaatgactgtgaaagatggtaaagtgactgaatctaactacgataacgtgaacgctgacggcaaatctaaaaaagatgacactgaatacgaaagcaaaatgaaagacgttgctggcgttggaccaaaagaatatatcgaaacattaaacaaagaatttgttaaagcaatgggcgaagaagacggatcacctgcaggtgttgaagtagtaactggtgcaacacacagcacacattcattcatcaactacgcacaacaattagtgaacgctgctgaaaaaggcgacacaactgaaatcgttgttgacaacatcgtaacaaaatag

SEQ ID NO: 762 - protein, 309 aa, Enterococcus faecalis; identical to SEQ ID NO: 82

SEQ ID NO: 763 - DNA, 930 bp, Enterococcus faecalis
atgaaagtgaataaatttgttaaaggttttgcggcaattgcattatttagtttagtattagcaggctgtggcgcagacaagaaagacaacacaacgaactcttctagcgcagcatcttcagaaacgaaaaaatcaactgaatcatcagcaccagcgaaaaaagttgccggtggcgatttaaaagatggtacgtataaattagaagaaaaaaatgaaaaaaatggttaccgtgcagtctttgaaatgactgtaaaagacggcaaaatcactgaatctaaatatgacaacatcaatgctgacggcaaatctaaaacagaagacactaagtatgaagaaagcatgaaagcaaaatctggtgttggaccaaaagaatacatcaaacaattaaacgattcttttgttaaagcacaaagcgcaagcggtgtggaagtagtaactggtgcgactcattcatctgaatcattccaaaactacgcacaacaattaatccaagcagcacaagctggtaacacagacacaatcgaaatcgacaatggcgcagcattgaaagatggtacgtactcattgaaagaaaaaaatgactcaaacggctaccacacaacattctcaatgactgtgaaagatggtaaagtaactgaatctaactacgataacgtgaacgctgacggtaaatctaaaaaagatgacactgaatacgaaagcaaaatgaaagacgttactggcgttggaccaaaagaatatatcgaaacattaaacaaagaatttgttaaagcaatgggcgaagaagacggctcacctgcaggtgttgaagtggtaactggtgcaacacacagcacacattcattcatcaactacgcacaacaattagtgaacgctgctgaaaaaggcgacacaactgaaatcgttgttgacaacatcgtaacaaaataa

SEQ ID NO: 764 - protein, 309 aa, Enterococcus faecalis
MKVNKFVKGFAAIALFSLVLAGCGADKKDNTTNSSSAASSETKKSTESSAPAKKVAGGDLKDGTYKLEEKNEKNGYRAVFEMTVKDGKITESKYDNINADGKSKTEDTKYEESMKAKSGVGPKEYIKQLNDSFVKAQSASGVEVVTGATHSSESFQNYAQQLIQAAQAGNTDTIEIDNGAALKDGTYSLKEKNDSNGYHTTFSMTVKDGKVTESNYDNVNADGKSKKDDTEYESKMKDVTGVGPKEYIETLNKEFVKAMGEEDGSPAGVEVVTGATHSTHSFINYAQQLVNAAEKGDTTEIVVDNIVTK

SEQ ID NO: 765 - DNA, 930 bp, Enterococcus faecalis
atgaaagtgaataaatttgttaaaggttttgcggcaattgcattatttagtttagtattagcaggctgtggcgcagacaagaaagacaacacaacgaactcttctagcgtagcatcttcagaaacgaaaaaatcaactgaatcatcagcaccagcgaaaaaagttgccggtggcgatttaaaagatggtacgtataaattagaagaaaaaaatgaaaaaaatggttaccgtgcagtctttgaaatgactgtaaaagacggcaaaatcactgaatctaaatatgacaacatcaatgctgacggcaaatctaaaacagaagacactaagtatgaagaaagcatgaaagcaaaatctggtgttggaccaaaagaatacatcaaacaattaaacgattcttttgttaaagcacaaagcgcaagcggtgtggaagtagtaactggtgcgactcattcatctgaatcattccaaaactacgcacaacaattaatccaagcagcacaagctggtaacacagacacaatcgaaatcgacaatggggcaacattgaaagatggtacgtactcattgaaagaaaaaaatgactcaaacggctaccacacaacattctcaatgactgtgaaagatggtaaagtgactgaatctaactacgataacgtgaacgctgacggcaaatctaaaaaagatgacactgaatacgaaagcaaaatgaaagacgttactggcgttggaccaaaagaatatatcgaaacattaaacaaagaatttgttaaagcaatgggcgaagaagaaggctcacctgcaggtgttgaagtggtaactggtgcaacacacagcacacattcattcatcaactacgcacaacaattagtgaacgctgctgaaaaaggcgacacaactgaaatcgttgttgacaacatcgtaacaaaataa

SEQ ID NO: 766 - protein, 309 aa, Enterococcus faecalis
MKVNKFVKGFAAIALFSLVLAGCGADKKDNTTNSSSVASSETKKSTESSAPAKKVAGGDLKDGTYKLEEKNEKNGYRAVFEMTVKDGKITESKYDNINADGKSKTEDTKYEESMKAKSGVGPKEYIKQLNDSFVKAQSASGVEVVTGATHSSESFQNYAQQLIQAAQAGNTDTIEIDNGATLKDGTYSLKEKNDSNGYHTTFSMTVKDGKVTESNYDNVNADGKSKKDDTEYESKMKDVTGVGPKEYIETLNKEFVKAMGEEEGSPAGVEVVTGATHSTHSFINYAQQLVNAAEKGDTTEIVVDNIVTK

SEQ ID NO: 767 - DNA, 930 bp, Enterococcus faecalis; identical to SEQ ID NO: 723

SEQ ID NO: 768 - protein, 309 aa, Enterococcus faecalis; identical to SEQ ID NO: 724

SEQ ID NO: 769 - DNA, 930 bp, Enterococcus faecalis
atgaaagtgaataaatttgttaaaggttttgcggcaattgcattatttagtttagtattagcaggctgtggcgcagacaagaaagacaacacaacgaactcttctagcgcagcatcttcagaaacgaaaaaatcaactgaatcatcagcaccagcgaaaaaagttgccggtggcgatttaaaagatggtacgtataaattagaagaaaaaaatgaaaaaaatggttaccgtgcagtctttgaaatgactgtaaaagacggtaaaatcactgaatctaaatatgacaatatcaatgctgacggcaaatctaaaacagaagacactaagtatgaagaaagcatgaaagcaaaatctggtgttggaccaaaagaatacatcaaacaattaaacgattcttttgttaaagcacaaagcgcaagcggtgtggaagtagtaactggtgcgactcattcatctgaatcattccaaaactacgcacaacaattaatccaagcagcacaagctggtaacacagacacaatcgaaatcgacaatggcgcagcattgaaagatggtacgtactcattgaaagaaaaaaatgactcaaacggctaccacacaacattctcaatgactgtgaaagatggtaaagtgactgaatctaactacgataacgtgaacgctgacggcaaatctaaaaaagatgacactgaatacgaaagcaaaatgaaagacgttgctggcgttggaccaaaagaatatatcgaaacattaaacaaagaatttgttaaagcaatgggcgaagaagacggctcacctgcaggtgttgaagtggtaactggtgcaacacacagcacacattcattcatcaactacgcacaacaattagtgaacgctgctgaaaaaggcgacacaactgaaatcgttgttgacaacatcgtaacaaaataa

SEQ ID NO: 770 - protein, 309 aa, Enterococcus faecalis; identical to SEQ ID NO: 724

SEQ ID NO: 771 - DNA, 930 bp, Enterococcus faecalis
atgaaagtgaataaatttgttaaaggttttgcggcaattgcattatttagtttagtattagcaggctgtggcgcagacaagaaagacaacacaacgaactcttctagcgcagcatcttcagaaacgaaaaaatcaactgaatcatcagcaccagcgaaaaaagttgccggtggcgatttaaaagatggtacgtataaattagaagaaaaaaatgaaaaaaatggttaccgtgcagtctttgaaatgactgtaaaagacggcaaaatcactgaatctaaatatgacaacatcaatgctgacggcaaatctaaaacagaagacactaagtatgaagaaagcatgaaagcaaaatctggtgttggaccaaaagaatacatcaaacaattaaacgattcttttgttaaagaacaaagcgcaagcggtgtggaagtagtaactggtgcgactcattcatctgaatcattccaaaactacgcacaacaattaatccaagcagcacaagctggtaacacagacacaatcgaaatcgacaatggcgcagcattgaaagatggtacgtactcattgaaagaaaaaaatgactcaaacggctaccacacaacattctcaatgactgtgaaagatggtaaagtgactgaatctaactacgataacgtgaacgctgacggcaaatctaaaaaagatgacactgaatacgaaagcaaaatgaaagacgttgctggcgttggaccaaaagaatatatcgaaacattaaacaaagaatttgttaaagcaatgggcgaagaagacggctcacctgcaggtgttgaagtggtaactggtgcaacacacagcacacattcattcatcaactacgcacaacaattagtgaacgctgctgaaaaaggcgacacaactgaaatcgttgttgacaacatcgtaacaaaataa

SEQ ID NO: 772 - protein, 309 aa, Enterococcus faecalis
MKVNKFVKGFAAIALFSLVLAGCGADKKDNTTNSSSAASSETKKSTESSAPAKKVAGGDLKDGTYKLEEKNEKNGYRAVFEMTVKDGKITESKYDNINADGKSKTEDTKYEESMKAKSGVGPKEYIKQLNDSFVKEQSASGVEVVTGATHSSESFQNYAQQLIQAAQAGNTDTIEIDNGAALKDGTYSLKEKNDSNGYHTTFSMTVKDGKVTESNYDNVNADGKSKKDDTEYESKMKDVAGVGPKEYIETLNKEFVKAMGEEDGSPAGVEVVTGATHSTHSFINYAQQLVNAAEKGDTTEIVVDNIVTK

SEQ ID NO: 773 - DNA, 930 bp, Enterococcus faecalis
atgaaagtgaataaatttgttaaaggttttgcggcaattgcattatttagtttagtattagcaggctgtggcgcagacaagaaagacaacacaacgaactcttctagcgcagcatcttcagaaacgaaaaaatcaactgaatcatcagcaccagcgaaaaaagttgccggtggcgatttaaaagatggtacgtataaattagaagaaaaaaatgaaaaaaatggttaccgtgcagtctttgaaatgactgtaaaagacggcaaaatcactgaatctaaatatgacaacatcaatgctgacggcaaatctaaaacagaagacactaagtatgaagaaagcatgaaagcaaaatctggtgttggaccaaaagaatacatcaaacaattaaacgattcttttgttaaagcacaaagcgcaagcggtgtggaagtagtaactggtgcgactcattcatctgaatcattccaaaactacgcacaacaattgatccaagcagcacaagctggtaacacagacacaatcgaaatcgacaatggggcaacattgaaagatggtacgtactcattgaaagaaaaaaatgactcaaacggctaccacacaacattctcaatgactgtgaaagatggtaaagtgactgaatctaactacgataacgtgaacgctgacggcaaatctaaaaaagatgacactgaatacgaaagcaaaatgaaagacgttgctggcgttggaccaaaagaatatatcgaaacattaaacaaagaatttgttaaagcaatgggcgaagaagacggctcacctgcaggtgttgaagtggtaactggtgcaacacacagcacacattcattcatcaactacgcacaacaattagtgaacgctgctgaaaaaggcgacacaactgaaatcgttgttgacaacatcgtaacaaaataa

SEQ ID NO: 774 - protein, 309 aa, Enterococcus faecalis; identical to SEQ ID NO: 716

SEQ ID NO: 775 - DNA, 930 bp, Enterococcus faecalis; identical to SEQ ID NO: 723

SEQ ID NO: 776 - protein, 309 aa, Enterococcus faecalis; identical to SEQ ID NO: 724

SEQ ID NO: 777 - DNA, 930 bp, Enterococcus faecalis; identical to SEQ ID NO: 723

SEQ ID NO: 778 - protein, 309 aa, Enterococcus faecalis; identical to SEQ ID NO: 724

SEQ ID NO: 779 - DNA, 930 bp, Enterococcus faecalis; identical to SEQ ID NO: 715

SEQ ID NO: 780 - protein, 309 aa, Enterococcus faecalis; identical to SEQ ID NO: 716

SEQ ID NO: 781 - DNA, 930 bp, Enterococcus faecalis; identical to SEQ ID NO: 715

SEQ ID NO: 782 - protein, 309 aa, Enterococcus faecalis; identical to SEQ ID NO: 716

SEQ ID NO: 783 - DNA, 930 bp, Enterococcus faecalis
atgaaagtgaataaatttgttaaaggttttgcggcaattgcattatttagtttagtattagcaggctgtggcgcagacaagaaagacaacacaacgaactcttctagcgcagcatcttcagaaacgaaaaaatcaactgaatcatcagcaccagcgaaaaaagttgccggtggcgatttaaaagatggtacgtataaattagaagaaaaaaatgaaaaaaatggttaccgtgcagtctttgaaatgactgtaaaagacggcaaaatcactgaatctaaatatgacaacatcaatgctgacggcaaatctaaaacagaagacactaagtatgaagaaagcatgaaagcaaaatctggtgttggaccaaaagaatacatcaaacaattaaacgattcttttgttaaagcacaaagcgcaagcggtgtggaagtagtaactggtgcgactcattcatctgaatcattccaaaactacgcacaacaattaatccaagcagcacaagctggtaacacagacacaatcgaaatcgacaatggcgcaacattgaaagatggtacgtactcattgaaagaaaaaaatgactcaaacggctaccacacaacattctcaatgactgtgaaagatggtaaagtgactgaatctaactacgataacgtgaacgctgacggcaaatctaaaaaagatgacactgaatacgaaagcaaaatgaaagacgttactggcgttggaccaaaagaatatatcgaaacattaaacaaagaatttgttaaagcaatgggcgaagaagacggctcacctgcaggtgttgaagtggtaactggtgcaacacacagcacacattcattcatcaactacgcacaacaattagtgaacgctgctgaaaaaggcgacacaactgaaatcgttgttgacaacatcgtaacaaaataa

SEQ ID NO: 784 - protein, 309 aa, Enterococcus faecalis; identical to SEQ ID NO: 736

SEQ ID NO: 785 - DNA, 930 bp, Enterococcus faecalis; identical to SEQ ID NO: 723

SEQ ID NO: 786 - protein, 309 aa, Enterococcus faecalis; identical to SEQ ID NO: 724

SEQ ID NO: 787 - DNA, 930 bp, Enterococcus faecalis
atgaaagtgaataaatttgttaaaggttttgcggcaattgcattatttagtttagtattagcaggctgtggcgcagacaagaaagacaacacaacgaactcttctagcgcagcatcttcagaaacgaaaaaatcaactgaatcatcagcaccagcgaaaaaagttgccggtggcgatttaaaagatggtacgtataaattagaagaaaaaaatgaaaaaaatggttaccgtgcagtctttgaaatgactgtaaaagacggcaaaatcactgaatctaaatatgacaacatcaatgctgacaacaaatctaaaacagaagacactaagtatgaagaaagcatgaaagcaaaatctggtgttggaccaaaagaatacatcaaacaattaaacgattcttttgttaaagcacaaagcgcaagcggtgtggaagtagtaactggtgcgactcattcatctgaatcattccaaaactacgcacaacaattaatccaagcagcacaagctggtaacacagacacaatcgaaatcgacaatggggcaacattgaaagatggtacgtactcattgaaagaaaaaaatgactcaaacggctaccacacaacattctcaatgactgtgaaagatggtaaagtgactgaatctaactacgataacgtgaacgctgacggcaaatctaaaaaagatgacactgaatacgaaagcaaaatgaaagacgttgctggcgttggaccaaaagaatatatcgaaacattaaacaaagaatttgttaaagcaatgggcgaagaagacggctcacctgcaggtgttgaagtggtaactggtgcaacacacagcacacattcattcatcaactacgcacaacaattagtgaacgctgctgaaaaaggcgacacaactgaaatcgttgttgacaacatcgtaacaaaataa

SEQ ID NO: 788 - protein, 309 aa, Enterococcus faecalis
MKVNKFVKGFAAIALFSLVLAGCGADKKDNTTNSSSAASSETKKSTESSAPAKKVAGGDLKDGTYKLEEKNEKNGYRAVFEMTVKDGKITESKYDNINADNKSKTEDTKYEESMKAKSGVGPKEYIKQLNDSFVKAQSASGVEVVTGATHSSESFQNYAQQLIQAAQAGNTDTIEIDNGATLKDGTYSLKEKNDSNGYHTTFSMTVKDGKVTESNYDNVNADGKSKKDDTEYESKMKDVAGVGPKEYIETLNKEFVKAMGEEDGSPAGVEVVTGATHSTHSFINYAQQLVNAAEKGDTTEIVVDNIVTK

SEQ ID NO: 789 - DNA, 930 bp, Enterococcus faecalis; identical to SEQ ID NO: 741

SEQ ID NO: 790 - protein, 309 aa, Enterococcus faecalis; identical to SEQ ID NO: 742

SEQ ID NO: 791 - DNA, 930 bp, Enterococcus faecalis
atgaaagtgaataaatttgttaaaggttttgcggcaattgcattatcaagtttagtcttagcagcatgtggtgcagacaagaaagacaacacaacgaactcttctagcgcagcatcttcagaaacgaaaaaatcaactgaatcatcagcaccagcgaaaaaagttgccggtggcgatttaaaagatggtacgtataaattagaagaaaaaaatgaaaaaaatggttaccgtgcagtctttgaaatgactgtaaaagacggcaaaatcactgaatctaaatatgacaacatcaatgctgacggcaaatctaaaacagaagacactaagtatgaagaaagcatgaaagcaaaatctggtgttggaccaaaagaatacatcaaacaattaaacgattcttttgttaaagcacaaagcgcaagcggtgtggaagtagtaactggtgcgactcattcatctgaatcattccaaaactacgcacaacaattaatccaagcagcacaagctggtaacacagacacaatcgaaatcgacaatggggcaacattgaaagatggtacgtactcattgaaagaaaaaaatgactcaaacggctaccacacaacattctcaatgactgtgaaagatggtaaagtgactgaatctaactacgataacgtgaacgctgacggcaaatctaaaaaagatgacactgaatacgaaagcaaaatgaaagacgttgctggcgttggaccaaaagaatatatcgaaacattaaacaaagaatttgttaaagcaatgggcgaagaagacggctcacctgcaggtgttgaagtggtaactggtgcaacacacagcacacattcattcatcaactacgcacaacaattagtgaatgctgctgaaaaaggcgacacaactgaaatcgttgttgacaacatcgtaacaaaatag

SEQ ID NO: 792 - protein, 309 aa, Enterococcus faecalis; identical to SEQ ID NO: 82

SEQ ID NO: 793 - DNA, 930 bp, Enterococcus faecalis
atgaaagtgaataaatttgttaaaggttttgcggcaattgcattatttagtttagtattagcaggctgtggcgcagacaagaaagacaacacaacgaactcttctagcgcagcatcttcagaaacgaaaaaatcaactgaatcatcagcaccagcgaaaaaagttgccggtggcgatttaaaagatggtacgtataaattagaagaaaaaaatgaaaaaaatggttaccgtgcagtctttgaaatgactgtaaaagacggcaaaatcactgaatctaaatatgacaacatcaatgctgacaacaaatctaaaacagaagacactaagtatgaagaaagcatgaaagcaaaatctggtgttggaccaaaagaatacatcaaacaattaaacgattcttttgttaaagcacaaagcgcaagcggtgtggaagtagtaactggtgcgactcattcatctgaatcattccaaaactacgcacaacaattaatccaagcagcacaagctggtaacacagacacaatcgaaatcgacaatggggcaacattgaaagatggtacgtactcattgaaagaaaaaaatgactcaaacggctaccacacaacattctcaatgactgtgaaagatggtaaagtgactgaatctaactacgataacgtgaacgctgacggcaaatctaaaaaagatgacactgaatacgaaagcaaaatgaaagacgttgctggcgttggaccaaaagaatatatcgaaacattaaacaaagaatttgttaaagcaatgggcgaagaagacggctcacctgcaggtgttgaagtggtaactggtgcaacacacagcacacattcattcatcatctacgcacaacaattagtgaacgctgctgaaaaaggcgacacaactgaaatcgttgttgacaacatcgtaacaaaataa

SEQ ID NO: 794 - protein, 309 aa, Enterococcus faecalis
MKVNKFVKGFAAIALFSLVLAGCGADKKDNTTNSSSAASSETKKSTESSAPAKKVAGGDLKDGTYKLEEKNEKNGYRAVFEMTVKDGKITESKYDNINADNKSKTEDTKYEESMKAKSGVGPKEYIKQLNDSFVKAQSASGVEVVTGATHSSESFQNYAQQLIQAAQAGNTDTIEIDNGATLKDGTYSLKEKNDSNGYHTTFSMTVKDGKVTESNYDNVNADGKSKKDDTEYESKMKDVAGVGPKEYIETLNKEFVKAMGEEDGSPAGVEVVTGATHSTHSFIIYAQQLVNAAEKGDTTEIVVDNIVTK

SEQ ID NO: 795 - DNA, 930 bp, Enterococcus faecalis; identical to SEQ ID NO: 62

SEQ ID NO: 796 - protein, 309 aa, Enterococcus faecalis; identical to SEQ ID NO: 82

SEQ ID NO: 797 - DNA, 930 bp, Enterococcus faecalis; identical to SEQ ID NO: 62

SEQ ID NO: 798 - protein, 309 aa, Enterococcus faecalis; identical to SEQ ID NO: 82
